United States Patent Application Publication US 2026/0191916 A1 - sequence listing, part 11

SEQ ID NO: 12 - DNA, 3944289 bp, Blautia wexlerae (residues 1,972,146-3,944,289 of 3,944,289)
  source 1..3944289: mol_type = genomic DNA
gttttatttctcataagcttgatcctgcagttcagccactgctccgaagacacaagcccctcatgaggtgccaccaccagcatatgtcccttaagattctgcagcttatctgtctgcgcatcccgcccctgataaagataacatccatgaatcccgtcaaactgctccggactgcttactatattggttccatggctcctgaaaaaacggtacacatccatatcagcccgcacatataccggatttctcaaaagctgggctagcatggaacgtatcagttcctttccgtagaactgcactcccttttccgcataatatctggtgatatccccataagaagtgtccggttgttcgtacatattaaaaatttcccgcacaattgccgcttccacgggttcttccacaagcttctttgtatggattccctccatcagaatctcctcaagccgataaccataaggaggcttgccacccatgcgaaaacctttctgacttctggaataatatgcgtcgctgacacgcttctgaatagtctcacgttccagctgcgcaaacacaatgcagatatttaacattgcccgtcccataggtgtcgaagtatcaaatttctctgtagaagagacaaattccacctgatactgctgaaacagattcatcatattggaaaaatccagaatagaacggctgatccgatccagcttatacacgatcactttctccacttcccctctgcggatatctgtcagaagctgctgaagctgtggcctgactgtattcttgccgctgtaacccttatccttgtactctttgaaacttccaccctttaactcgtacttgcagaactcgatctgactttcaatagaaatactatctgctctgtccactgactgccttgcgtagattgcattgattctcttcataggggtcctcctttgtgaaatgaaataattgttgttttgccgggcaatgttgttaccgttcaccctgcattccgcaacacgtcttgcaatgcacagaataaacagtaaccggcactgtaaccattcaacaattcctcctccgggaagaaaaacctgagcgattacattttgtctatacaattacgataacaaatatttaaaaatgtgtaaatcgacttttttctatctttatgtatagatttttccgacattttcattgtataatgatgtcataaacattcctctacaatcaactcgttcctctgctgatcatttataactgtcctgtaccgttaccgttcactctatacctatgccaccgactaaaaggagatttcccatatgagaagaaaatgtaccgattccctgatatactggaaaaaaaatcccggccgcaaacctttaatcctccaggggcttcgccagacaggcaagacctggctgcttatggacttcggaaataagcaatacgaacatacactctacatcaatctggaaacagaccgctctgctgcagactatctgtctgttccacatgatccacaggaagtactgctttttctggaaacctgtgcaggaaaaccactgcgccctgcctcttcccttctaattcttgacaatatccagtgcattcctcagatttccacacttcttacctctattgccctggactttccacaatatcacattgcctctatctataaaggtgtggttaactctgattctttctccgtccacgactttgatatcctgactctgtatccactggattttgaagaatttctgtgggccaatgctgagtttgcccttacaagagaaatccgcaatcatttctccgatttcagcccaatgggaaagaaactccacgaaaaagccctgtcacagttccgtctctatctgatcatcggcggaatgcctgctgccattatggaatacaaaaaagaaaagaagctcctgctggtacctgacacccagcaaaagctccttaatctttttctcagcgatattactgctctggctccaaaaggaaccgcccgccactgccgcaatgcctggctctcgatccctgcacagctcggcagaaccagccgtaaattccagtacacccgcattgcaaaaggtgctactgccaaagtctatcatgaacccctgcagtggctgatcagcgccggacttgccattccctgccagacagctgtctgcagcaaaccttcggaaacctccttacatctgtatcctgttgacaccggattatgctcatgcatactaaaaatccctgccttccagcttctctcaggagaagaaaccaccgccggtacagcctgtatcgaaacctttctggcacagcactttatccggaatggctataccctctcctactggtccagcggcaaccaggcggaagttccctttttactgtccaaaaacagtcattttattgccatagactaccgctccaccccacatcagaaatgcaggaaccttatgcagctgaataaatcttctctctctcctgcacccacgcaaatgtatttaatctctgccgaagacttcaggcaaaaagaagcttatcggatcgtgcctttatatgcggtattttgcatatagaacgtggcagatacaacaggcaaaagcagactccggccggtagttcttatgtaattcaatcaggctgttcagagtacgtactgttttactcttttccatttctgctgctttctcaatttctgatcttgacattttttcttttcctttaaggatgttgaccaggtattcctcttcgctgattctgacaggaagaggatattcactggaagtaccagctgatgaaatttatactacattaaacggaaatgaaattgatattgctaagaactttactttatcatacggtgaaaatcttaacattggtgaatttcaggacagccccttatatttttttatttcgtattcttttgaatatttcatactgacgttccaattccattttttcatctgtaaacaggccttttgcttccaatattcgctcaatagcctgagatggatccattgtatgatatggcaaaaacagccctttcagttcctttggctttacgatcttatagacttgcatggaagttaattcgtaggttattacaaaatacctgtaaatatatccaatccaatacatttcgttacgggtatatttcacagaaccataattagaaaacccatattcttcattaaccagctgcaggatatcctctgcctggatattattttccagtactgatccatcatcaagccttttagctattcgactcctcataaatcgcctgataaaaatctctgaacttgactccattttatcaattgacttttcaaatgctgttgcctgaagttcacataaaagcactccatccttattcatccttttcatatattggtcacccctttatgacagaatctcatcaatatatcttccctgccctctatattgccttttagctaatttaactttgtcatcacccagttttgactcttcaagtcttatatttttatagtattccctttcattatttgatatatagcatcgttctgttaattttatctgggatacagccttttcagtcagaaaaatatactgcatcccaagatttgtggcagcaagacaatgtttacactgttcatctgtaaggtctccggcgataaatgaattaataatttgaaacatacggttatctgcaattggagcaattatgtaatcacagttccgtgactgttctataagtgcctttactgccggatgatccttatactcatccaatgttcccctatagtaagcaatcgtcatcatccattcctgatttacttcatatctcttgcatttcagatctctgtcatcaaatctgatataatatacggaagaattaccaaaccctgaaacaaatgatattgcctgctcataactttctcctgtataaaatccctgcccaaaatcattattttttcttcccttatgaatatcaatctctccgtcaatttcagttttagcgccatgaaaaagcaatttttcatttgcacctaaatcatctctccagaacatttcctttaatttgtttatctttatgtttttatcaaatgcaaacgaatatactgcttccaaaagccttgccgatggttctgtttttttcagctcggttcttgagatcgtcacctgctctactccgattttttctgcaagttcactttgagaaaatcccagaatctctcgtatagacttcagatcctctgaaaaattatattccatattcatcacctcaaacttatttatagcatattacttaaataagttcaattaaaaattttatttgcaactggtaatccctgtgtgttaggatagttggaatgcatgcattcaacagaacatccattgataacaggaaagtattcagcccatggtccaatcttgaaatagttaaagtgaaataatccatttgggtaattactacagattcctaaaaaagaaggctccggtcattgcgaccggagcttttatttttacaatttacatatccaatttttcgataatacattcatgtatttttgttttcgtgtcataattaattccaaccattaataaatttccacagtaaccactcaatgccaggggataattgcgttcttttatctgccggattgcactgtcagcacttttatcccatttcaattcaattatcatagccggcctgtccaggtgctcttttcggggcaggtatacaatatctgcaaagccttttccggacggcagctccctgatttctgtataataagcacgagcactataatatgcaagtgaaagtacacaagccaatgcattctcatcattatactttaaaatagaagtttcaaaatgtgccgcctgtattttctcagcaactactttattttccagtttccatgttgcctgcagtaactcttcagaatttcttattgctgtaattacttcctgccatccggcatctcgtatggaagtaataaattccgttgtgatctcactgtttggaataaacacttcctttctggaaaaatcatatccgagatatcccagatggataaacagcgttaatacatcatcagcgcttgaaaaggtagtcatatcattattaaacgagctaatatctattgccagtctttttccggcaagtaattcgataatagcttctttcaggcccttataattcataacaatatagtctcgcagagcctcgaatgtttctgttttgttccagtaattatcaaaagaatggctcagcatggcacttacaacagaacggggattataaacatgtccgattttttcaaaaaaatatccgtcgtaccaacactttgtatcctgaaaactcatatcaaattgtttgcataacactttcacttcattctccgtgaaaccaacatactcagcaagcgctcctggattggtcatggaaaattcgtcaaacatatttaatgcagaatgagaaccgtactttttgattggaagaattcctgtcatataagtaagcccgacatagtttctgtctttcaacaggtttctgagaaaatccagatattttttctgagcctccatatcatttttattttctctgaaaatacagtcccattcatcaataataaaaacaaatggaattttgtactctctataaatttcctgcagcacgtcaatcagatctgtctgatccagataatcaagatcaggatactctctcagaagatcacgaagaacatatttgctgaaaagctcacacatcctgtcaatattatgtgtgcgactgaaaaaatcctgcatgttcaaaaaaattgtattatatctgtttaaatgcactgggaatgaagggtcttttgctatgctcatattggcaaataatttttgtgaatcacagtttctttgataatatgctgccagcatttcggcagccatagactttccaaaacgtcttggacgacttacacaaagaaacttctgcttagttcgaaatacctggtttgtatactgaatgagttctgttttatctacataaatctgggaagaaactgactcaaaaaatccctcatttcctggattcaaatataaccccataaataaaaaccacctttcttccaaactgattcctgttatttcttgtttataggaattataacattattctgatgcttctgccacagcaaagaatcgacaaattgttcttaatgtttgtcatttaaaagcattttcataagtgtagattctgctgaaactgcaaaacaaagagtggaagaaagagttcaaaatggtggacatggaattcctgcttcagatattgaaaaaagatatatagaatcctttgcaaatttgcagtatttgctgcaagaatgtgatctggcagttttttatgataatacggatagatttgctatttttcacaaaggtaaattggtaagattatcccaaaatgttcctgttgctgatttcttagtttgtcactagtcagatttgctcccatgtcataatctgctatgttttgtgtcattggcattttgtgcaatccggcagatttcctgccggattatctgtttcatttacaatgttacatatgagctgagtgcttcaagtgcttttacaatactgatgatgtccacctttgacagctccggatagtcctgttcaaggcgttccctgttccagaagcagtccgacagagacgatatttctgtgccgatcccccagttgggaatacacagatactttccatatgcatgttttcctaccagcagatggaaagtgctcccacgagcggtcacctcaaactcatttctgtttatgtttaatggacggatatgaccggtccagtttttttcattgctgtccggattgctgcactggtaataggatcccatagctactggggtcagatcatcgaaaaaatccgggaagaaagtaatctttacataaaatgatacagaaatttttataaagcaagaagaacagaaattcccaaataggactcctatcatcattacgataggagttcttttttgtcaaaatttattctatgattgtcgaaaagtttctctggtaaacaaacaacagctctgataaaatataaatacaaaatatgtgacagggaggtgacatccatagtacatcagacagatctggcacagactatagaccttgccgcagaacgtgcaagatatgacgaatgtgccaagaaactattaacctataaggcagttgctgcctggatcctcaaatcctgtacaaaagaattttcccaatacagtgttaagtttatctgtgaaaactgcttaaatggcaacatcgaagtttccagccgcgcagtacatcaggagcagcctgactacaccggaacactggatggaaacgaacggatagacagccttaattccgaggcaaatgcaatcagggaacagacggtatattatgacatccgtttcagggcatacattccggacaattcagaaccggtgcagctgatcatcaatctggagatccagttgaatgacacaccgggatatccgttagttacaagaggtttctattactgcgcaagaatgatatctgaacagtatgggactgtctttactggagaacactatgaaaaactccagaaagtctacagcatctggatctgtccggatccggcaaaaaaacgcaggaacgggattttccgctattacacagtacaagatacggtattggggaaaccttatgaaagtccggacagctatgaccttatggaagttgtgatcgtaaacctgggtgatgctgataaagaaagtgatctggagatccttgatctgctgaacacactcttttctctttccatatccccggaaacgaagaaagcccgtcttcaggatgatttcggcattgccatgacagaagaatttgaaagcgaggtgcaggatatgtgtaatcttggaaaagcacttgttgaacagggtattgaacagggcatcgaacagggcgtggaacaaggtgtaaaacagaaaaatctgtcccttgcaaaaatgatgcttgaagataaagaaccaattgacaaaattaaaaaatatactggttttgccacagataagctggaagagattgcaaaatctatgggaatgacttttacagcctaaagttctaaatgatacctttataattctgtatgaaactatactcaacaagtagcaagtttattacataatgtgaaaaaagctttcaatcgcatcttttcggatatgattgaaagcttttttgcgcattaaatacagacctttttgaatataattatgtattttcatataaaaatctataaaaaattagttataaatcatataacgcatatactttaacaaataatcatcattcctcacaccaaatccctatacaaaatcaacctgtccaccacccaaaggggaactataatcatgacaaagattaaaaacacaaagaagggcatggcaaaaaagacattaagtatgtcacttgttgttgcaatgcttgctacttctaatgtgccggtatgggctgctgagttcagtgatggatctgatgcttccgtagctactgaagcagatgcttttactgctgatgaaacagaagttccagttgtagaagatactccagatgtagatactgctactgcagatgcaatcacagctagcgaccttgatgtatctggacttacatttacattagatggtggaagtaaattagatggaaaagctgtatttggtaataaacttaccgtaggtggaaagattgtaaaaaaatctgataatacaccattacaaaattattcatttggatacagaattaaagggcatacagatgctttattaactggaacagtaaataacaattccgtagcttcaatgagtcagaatctttatggtgatacatggacacctgcaattgggcagactattgagttatatattttcagagatgacgctgctgctaaaatcgataatttagttcttgcatcatttacactggagaaaaaagaagtaacaggtgccattgaattacagttagatggacaaattgctggtcagggtacttttaaaaagacaacagatggatataccgttgcttatacaggaaaaacttattcattcagcaaagatgctacagatgaaaactctattgcaatcaaagaaattacgagagcagataatacttctgttaaagttgactgggataaatatgatgtagcagtatctaatcctattcagaatgttggcgatgtaatgactatccgagttacaccgaaggaaggttctggatttagcggagagtttacaacaaaagtaaccgtagtaaaacgtcagggcaacaaaaaagctgaggaatttcttaaagcagaattaaaagaaaatctggaatatgaatatacaggtaatgcaattgctgttccgactgataaacttgctgtaaaagaaaatggttatgctgatgctacattggcacaggatgttattaaaactgcaactattccagcaggttcaaatgcaggttcaaatccgcagatttctgtaaaactgaatgctgataaagtaaacaactttgatatctcagcaggagatactttaactacaagtaatactgtaggttatcaggtaacaattacaaaacgtgatttaagtaaagtaaatgttagccttgcatacaaaggaaatgcattagattgtgttcctgagaaacttaaagtaaaagacctttataaatatcttgcatttgctacaactgatggtacagcattaaatatcttaaataccgactatactcttgaagtaagagacggaaataccgttatgaaagcagagaatgactttaaacagggatcatatactgctacagttgctgctactacaaatggtaactgtgtaaattctgttgatttcacatttactgttggtagtgctgtttcttctgctaaaagtgataatcttactcagacacagtatttctatacaggatccgagatcaaaccagataaaacagtcttaggtgatgttgatatctatggtaaagtaactggagaaacagaagtaagaaaagtttcaactataaaaccggccgcttatgaaattgtagggtataagaataacattaatgcaaatgctgctcagaaaaacacagttccaactgttactattaaagtaactggtggtagtgattatgtcggcagaacatttgatgttccatttactatccagcagttaacagtttctaaagatacagttactgtaccgaaaacagtttcctatgaaaaggattatactaaagcagacgaatataaagttcagcttgctgtaactgccaaagatacagacaaaaagacaattgtaaaagctttaactgctaatgattatactgtaaaatatgaatacaaagcaggacagaaaaacgctgatggttcttatacagcaacagctaacaatggaaaaaatgaccttcataacttcattcaatctacaattgttattacaaataaaaactttagaacacaggatacagttagtggtactgccgtttacggaaccgaactgactcttgcagataaaacagagatcgtggctagggctctgacagacagtatggttaaggttaatccatccagctatacatatactggagcagccattgttccaaattattatgtaattgatggtgttactgtactgtatgatcaggctgactatggaacaaagggcgaatacaaatatgtacgttgtgataacaacttaaatgttggtgttgccaaagtagttgtagcaggtgtaaatgataaatattcaggaacagcttctgcatcatttgaaattactccggcaaatacaaatgatgttaaagtgacaattgataaccagatttatacaggaaaacaggttagacctcgtacatttaaagtaactttaaatggaaacgatgttacaaatcagtttgagattgttggatatggtgagaatgtttccggtaaaggtactgtagaattaaaaccagttgcttccacaaagaactttacaggatctaacgttacagctgaatttaacattgtaaaagaagttgtatctgctgaattatctgtctttgataaaaatggtgttaatgtaacaagtcattatgaagtggctgacaatgcaacttccgcaccaagcaaagcatttgattttgatggtacagaaaaaacatttgctgctactacaatcaaaaatatccagaaagtaaacagcaatgatggtggattagttgctacaaaagctactgctaatgatcttgaagttaaatactatgaaaatattgcaggtgaaaaatctggattaacagattctgagggaaatcattataatattgcatatgtatatcttgttgcaaaagacggaagcggatatacaggagacaaaacacttcctggtaccaaaattacaggtgttgtagattacatcacatttgcaatcaagaatgtagcgtttgttgacaaaaatgtcactgttactaacggcgtatatgctggtggacttcaggtaagacctcaggttcttgtacagattaatggaaatactttagttgaaggtaaagattatgagttagtagttgaaggtgaagttgacggaaaccattacacagatgctacagctgcaaaaccattcaaagttactgtaaaaggtaaaggtggttatacaggatctttatctagcaaatttgactggggtattgacaaaaaagatattaaagactgtgatgttaaagttactgacggtatcgtaactgttatgaacggatatgttcctgttccaactacagagtacacatccaagaataacggagacggaacctacacagtaacagctaacagcacatccaagaactacacaggttccaagacggttaaagctgatggaaaagccgcagatgaaaaaccagatgctccaatgatcaccagcgttaaagttgttggcaacaaagcaactgctatcctttccggtgatacagaaggtgctgcaggttacgactatgtaatctccacagaccgtgactgcatcacaaacaaagattacgcttctgtaaacaagaaccagattcagacctctactacattcaaatatgtacagcagggaacatactacgcatactgccacgcttggaaacgtgacgagaacggtaagaaggtattcagcgactggtctaacgcatatccattcgttgtatccgcaatcacaccggacgctccagttatcacaaacgttaaagtaagcggatctactatcaaagtaacatacaaagcagctgcaaatgcaactggttacgatgtagtacttggaacatcctccaagaaagaaaacggtgagacacgtccatatcactatggcgatcacaaagtactgaacctcaaagaaggtacagtaacagcaacattcaagaacgtaccaaagggaacatgggtagttggaatgcatgcattcaacagaacatccgaagacggaaagaaagtcttcagcccatggtcaaacctgaaaaaggctactgttaaataatccatttgggtaattaatacagattcctaaaaagaaggctccggtcattgcgatcggagtctttctttttaataaacctataccatatattctaacagaatcttatccttatattgctttctgctatttcaaggtgtatctgactcccctgcctgcacctgtttttttcaggattttcttttcaatcaggctgttcagagtacgtactgctttactcttttccatttctgctgctttctcaatttctgatcttgacattttttcttttcccttaaggatgttgaccaggtattcctcttcgctgattccgacaggaagaggatattcactggaagtaccagctgatgaaatttatactacattaaacggaaatgaaattgatattgctaagaactttactttatcatacggtgaaaatcttaacattggtgaatcaggacagccccttatatttttttatttcgtattcttttgaatatttcatactgacgttccaattccattttttcatctgtaaacaggccttttgcttccaatattcgctcaatagcctgagatggatccattgtatgatatggcaaaaacagccctttcagttcctttggctttacgatcttatagacttgcatggaagttaattcgtaggttattacaaaatacctgtaaatatatccgatccaatacatttcgttataggtatatttcacagaaccataattagaaaacccatattcttcattaaccagctgcaggatatcctctgcctggatattactttccagtactgatccatcatcaagccttttagctattcgactcctcataaatcgcctgataaaaatctctgaacttgactccattttatcaattgacttttcaaatgctgttgcctgaagttcacataaaagcactccatccttattcatccttttcatatattggtcacccctttatgacagaatctcatcaatatatcttccctgccctctatattgccttttagctaatttaactttgtcatcacccagttttgactcttcaagtcttatatttttatagtattccctttcattatttgatatatagcatcgttctgttaattttatctgggacacagccttttcagtcagaaaaatatactgcatcccaagatttgtggcagcaagacaatgtttacactgttcatctgtaaggtctccggcgataaatgaattaatgatttgaaacatacggttatctgcaattggagcaattatgtaatcacagttccgtgactgttctataagtgcctttactgccggatgatccttatactcatccaatgttcccctatagtaagcaatcgtcatcatccattcctgatttacttcatatctcttgcatttcagatctctatcatcaaatctgatataatatacggaagaattaccaaaccctgaaacaaatgatattgcctgctcataactttctcctgtataaaatccctgcccaaaatcattattttttcttcccttatgaatatcaatctctccgtcaatttcagttttagcgccatgaaaaagcaatttttcatttgcacctaaatcatctctccagaacatttcctttaatttgtttatctttatgtttttatcaaatgcaaacgaatatactgcttccaaaagccttgccgatggttctgtttttttcagctcggttcttgagatcgtcacctgctctactccgattttttctgcaagttcactttgagaaaatcccagaatctctcgtatagacttcagatcctctgaaaaattatattccatattcatcacctcaaacttatttatagcatattacttaaacaagttcaattaaaaattttatttgcaactggtaatccctgtgtgttaggatagttggaacgcatgcattcaacagaacatccattgataacaagaaagtattcagcccatggtccaatcttgaaacagctaaagtgaaataatccatttgcgtaattatactgccatcccctgtatgtatatctacagttgctgcgaagataattaaatgaattgtaccacacattatcaaaatctatacagcgcttgtcttaatttgtcaatagttttttctagtaactcttcctgttatttgttataatgaactcatgttaatctgtaatgctccaggagaaaaaagaaatatggaaaaattatttgttacaaaactggaaattaaaaaagtacgccatttaaaagatatcactatcaatttatctgatactacttcccgacacctgatttttaccggcaaaaatggaagtggtaaaacaagtgtattagatgctattgccgcttatctgaaaatgaaattccaagtatcagatttaaatttagcaaaaacaaaagggatggatccttatactttgaattcagcaaaacgttgtttaacctatttcaatacgctgaattcatctgttaaactgtcatttaataatgagacagacataaatttaaaagaactatatgccgatggaagttttttattagcttactataaatgtgacagaaactttcaggctgaagtacctgaacatatagaaaaagtttctctaaatgatgcctatgatctaaacgatgctcccagaaacttgtttgttaaatatcttgcagatctaaaagtgacagaagcattggcaagagcaaaatcaaataacacgaaagcagattctataaataattggtttatccagtttgaaaagcttttgcaacaaatatttgaggatactacgttgaaattagattttaatgaagatacgttttcctttatgatctgccagagtggaaaagaaccttatgatttcaactgtatgtccagtggattttcagccatcatggatattgttctggatctcatgattcgtatggtcaagaaaaaaggacgtatttttgaatttgaccttcccggaattgtacttatagatgagatcgaaacgcatcttcatcttgaactgcagaaacagatcatgcatatcctaacctgcctgtttccaaatattcagtttatcgtttcaacccattctccgttcgtgcttaacagcctggacaatgtggtaatttacgatcttgagaatcacatcattgttgaaaatggattgtcagatgtaccatatgatggaattgtaaaaggttatttccaggttgataccttatccgatacattaaaaaataaatttcagcaatataaaacccttgttcagaagccgaagcttactgatgatgactttgaaaaaattgcagagttggaaatgtttttggatgaaatccctgattacctggctcttgacatcaccacagaatatcagcagttaaaagaagaactggcacaacgggaggatatctgatggtaaaaatagaacgttcttttcccgctcctgcctctttggaatcagaagcaaaaaaagtttccggaagctatgaacagccagatgttgtatcccggttgagaaaagattttcacgataagtgctacatttgcgaactgaaaaatcttcaggatcctcaggtagaacaccttttgcctcataaaaacggaaaataccctgaacgaaagtttgactggaataatttgttttggtcatgcagtcactgcaatggaataaaaaatcagaaaaagtatgataatggaattatagactgttgtaaaaatgatccagagcttatgatgacgtttaaattaaaagatggaaaaactgaaatttcagccaaagatgaacataattccatggcagtaagaactgctctgctcatttacgaatccttcaatcttctcaatactggtatgcggacatataaaagtgcaatgcgctacaatgaacttacaaaggaaatgaaccttctatatgacaatcttgaagcatatagaaaaaatcctgattccagatatatacagcgaaaactaaaggcactgctccgtcgggaatctgcatttgctgcctttaaaagaagctacataagagataattgtaaggaattcccacaattgcagtcttatatagaatagctcctgttttatatggcaggagttattttattcttccccttttattgaaaatatgcaattgttactgatttctcagcttgtcattcgccagaaacagaaccgggttccgatttattgtgctaatagagaaaatatagatacaattgttgaaatttatttttgctgatccgacaccgtcaatttttcagacagatcccctgagcattttatattttatgagtctcatcatgtatcgttacttgttacaatcagcgtaaaacaagaagagttttttcaatacatcatcagatttatttgcaataactgcctgttttcactacgattgtcaacaattatccacttataaatcataatatccggatattcctcaagtctggaatcaattccccatacgaaattttctccaaaatcaacctgtccaccacccaaaggggaactataatcatgacaaagattaagaatacgaagaaaggcatggctaagaaaaccttaagtatgtctctcgtcgttgcaatgctggcaacctctaacgtgccggtttgggctgctgagttcagcgatggtactgacgcttccgtagctactgaagcagatgcgttcgctgcagaagctcctattgttgacgatacagaagacgcagctccagcatctgtaatggtaaatgaagctgatattactcttaacttatctgcagacagcaaaaaagttgtttggggaggagcatctgttatcagtggtactgtaactaaaactgacggatcagaagtagaaggtggatggcagtatcgttgggttgacgaaaaaggtattgcatatgcatcttctaacggaaaagtagacgatgcagctgatatgagtttgaatacaacagctgacatggctggaaaaacattaactctttatgtttacgatgtagacagcaatcagcagactctttatgacattaacacaggtatttctgtagctgtagaaaagagatctttaaattctgtgactgctacacctgcaaccacaacaaaagcatacaacggttttgctcagactattactgaagctgacggcgttgcacttactgttctggattctgaaaatgcaaatgtagctgctgatgcttatgaaacatctgtaactaatgcaactaataataaagaagaattcaaacttactgtaacagcaaaagaagactctgcttacacaggcagtgctgaacttgtaatcggtaaggttacagcaaaagcatatgcaaaaggagatatccttgcaacagcaacaaaaggacagtcctatcagtatacaggtaaggctattaagatttccaaagataacattacattaaaagaatctgcttccagtaataaaggcgctgatggaaaattaagcggtgctgatttatctgctgcagttacaactgctcaggttgaatatacaaaagtaggtgattaccccgttgttgtatatgttgacaaaacaaaattaaagaattttacaggtgcagatgaatattacacaacagatgagactgttaacgttgcaaaacgtgacctctctacagcaggaacaaagattactgttaacactttaagtggacagattccaacagatattgctgtaagcaaattagctgattatctgacatttacaggtgtagaaggctcagacctttctgcaattaaaaactccagcaaagaatatacacttattgtaaaaaatgctgatggtacagacgctaaacagtttaaaaacggaagtacatatactgttacagtacgtgcaaaagacggtggaaactgcacaggtgagcagacattcactgttgttgctactgcagctgcattaaatgctgtatctgcaaaaacacagtatacaatagattatacaggcgatgagatcaaaccttccaagagcgatttaggagaactggttattcagtatttcaacgcacagggtaaacccaaaacagaagatcttggaacagacggatacgaaatcacaggatatacaaacaacgtaaatgcaacaactgtatatgacggaaattacaatccagtagcaaatgcttacgttaacatcaagattacaagcggaacatacaaagatcagacagcatctattccgttcttaatcaaaccactggtagttgaagctgattatgtaactgtaccggatgatgtttctattaataaagcacttacagaagcaggcgaatataaacttcctgtaacagttgtagcaaaagacgaaacaggaaaaaaagtagaaaaaactctcacagacagcgatttcacagttaaatatgaatatgaaaaagctttcggtaatgacttgtttaacaacatcattacaaaagttactgctacaaacacaaactatattttaaaaacaacaaacggcaaaacaagaactgttacagcaagcggtaagacagaaatcgtacctaagaaattaacagacgctatggttgttgcaacaccttctacttatacttacacaggtggaaagatccagcctacttatgcagtgcttgacggtgctattgctctttacaagaagggtgaagttaacgataaagatgctgaatatgaggaagtaagcatcagcaatgctgtaaatgttggtactggaacaatcactgtacagggatgcaactacttctattcaggaaaagcaactggaacatttacaatcacagctgcaaacacagcagatgtaaaagtatccatcgctgatcaggattatactggaaaacaggtaagacctcgtaaatttacagcaacattaaatggaaacgatgtgtccaaccagtttgagattgtttcttatggcgaaaatgttgaagctggaaccggaacagttgttctgaaaccattagatggaaacaagaacttcacaggttctaacatcacagcaagcttcaatatcgtaaaagaaaaagtagaagctactcttaatgtttatgacagcaaaggatttgatgtaacagatgcttataaagcagacgtagataaagatgctgatggaaatgtaaatggtgtagttcataacagccaggttgcattcacatttgacggaaatgagcatacttttgcaaaggcattattaagcaacatcagaaaagttacaaatgatggcgtaaagacaactgcaaaagaaagcgatttcgaaatcaaatatgcagacaatatcacaggtaagaaagtaactgctggaaaagaaaacattggttatatctatgcagtagctaaagaaggaacaggatttgcaggaaccaagacaattgttacttctgacggaacaattatcaatggtgttgttgcttatatcccgtttacaatcaaatctgttaaatttgttgctaagaatgtaagtgttaaaaatgctacatatgcaggtggtcttccagttaaaccagaagtactgattcagattggtggaagcacattagttgaaggtaaagattatacacttagattaatcgacaaaaatggcaacactgtaactcctattgatgtaacagttggtgacatctatggcgttgagatcaaaggtatcaacggatacacagaatctggtgttgcaacattcgatacagacgatgttgacagtacagcttactccagagcaaacttaacatggggcgttgataagaagaacatcaacgattgtactgtaactgtaaaagatggcgttacaactgtattaaatggatatctcccagttccggctacagaatatacttctgaaaagaacactgacggaacatatacagtaaaagcaaacagcacatccaaaaactacacaggatccaagacagtagttgcagacggaaaagcagaagatgaaaaaccggatgctccgatgatcactaaagtaaatgttactggaaacaaagcaacagttgttctttctggtgatactgatggcgctgcaggctatgactacgtaatctctacagaccgcgattgcatcacaaataaagactatgattccattagcaagaatcaggtcagcacatccactaactttaagtatgtacagcagggaacatactacgcatactgccacgcttggaaacgtgacgaaaacggtaagaaagtattcagcgactggtcaaatgcatatccattcgttgtatctgcaatcacaccggatgctccgatcatcacaagcgtaaaagtaagcggaacaactgtaaaagtaacatataaagcagctgctaatgcaacaggatacgacgtagtacttggaacatcctccaagaaagaaaacggcgagactcgtccataccactatggcgatcacaagatcctgaacctcaaagaaggtacagtaacagctacatttaagaatgtaccaaaaggaagctggacagtaggaatgcatgcattcaacagaacttccgaaaacggcaggaaagtattcagcccatggtccaatcttaaaaagatcactgtaaaataatccatttgggtaattttatataagattccaacaggcaagacggggcataattcatgattatgccccattcttgcaatgcaaaagaaatatgtttttcagataataaaggagaaaaagagtatgggattaaaagaacgtagaaaaaaaatcatggctttaatgctcgctgcctgcgtagcagggaccagcgttgtacctgtagcagcttctgacgtcagcgtattctctgatggaactgatgccgcaccagaagcatttgattctgttgatgttggcagtgctactgaagcacctactaaaactgtaaaaattaacttctactgtccagacgaaaagaaacagatcgctgagcctgcacttgaagttgctaaagatgctacttctgtaaataccagcaaacttactgttccggaaggttatgaacttgttgaaagtggtgatctcccaatcaatgatggctatgtatacgcagtagttcgcagagctgcaactactaaaactgtaaaaattaacttctactgcccagacgaaaagaaacagatcgctgagcctgcacttgaagttgctaaagatgctacttctgtaaataccagcaaacttactgttccggaaggttatgaacttgttgaaagtggtgatctcccaatcaatgatggctatgtatacgcagtagttcgcagagctgcaactactaaaactgtaaaaattaacttctactgcccagacgaaaagaaacagatcgctgagcctgcacttgaagttgctaaagatgctacttctgtaaataccagcaaacttactgttccggaaggttatgaacttgttgaaagtggtgatctcccaatcaatgatggctatgtatacgcagaagttcgtaaagttgcaactactaaaactgtaaaaattaacttctactgcccagacgaaaagaaacagatcgctgagcctaaacttgaagttgctaaagatgctacttctgtaaataccagcaaacttactgttccggaaggttatgaacttgttgaaagtggtgatctcccaatcaatgatggctatgtatacgcagaagttcgtaaagttgcaactactaaaactgtaaaaattaacttctactgcccagacgaaaagaaacagatcgctgagcctaaacttgaagttgctaaagatgctacttctgtaaataccagcaaacttactgttccggaaggttatgaacttgttgaaagtggtgatctcccaatcaatgatggctatgtatacgcagaagttcgtaaagttgcaactactaaaactgtaaaaattaacttctactgcccagacgaaaagaaacagatcgctgagcctaaacttaaagttgctaaagatgctacttctgtaaataccagcaaacttactgttccgaaaggttatgaacttgttgaagttggtgatctcccaatcagagatggctatgtatacgcagaagttcgtaaagttgctactactaaaactgtaaaaattaacttctactgcccagacgaaaagaaacagatcgctgagcctaaacttaaagttgctaaagatgctacttctgtaaataccagcaaacttactgttccgaaaggttatgaacttgttgaagttggtgatctcccaatcagagatggctatgtatacgcagaagttcgtaaagcagttacaacaaaaggaattactgttgtatatcaggatagaaaaggaaatgtcatcaaaacagctcctatgactgttgataaagatgctacttatattaacactggcaaattaacagcaccagatggatatacaattggcatcgttggtgacattaaaatttcccaaaataacaaagtttatattactgtagaccagaataagaaatctgtaactgttatttttaaagaatctggtaatgttgtcagcagtaaaaaactttctgtagtagctactgcccaatatgttgataagagcagaatcacagcaccagccggatatcggattgcaacaactgattccaaattaaaaatttccgaaaataatacagtaactgttgaggttaaaaaattaggaaaaacaattaaagttgtttatagattagcaaaaacaaacagaattgttactactggaaaaatcgttgtcgataaaaaagctacatctattaaagccagtgaagttccggtaccagcaggatacaaaatggtaacaacaggttcctgctctgtcagaactaaaaaaatcgaaatctatgtaaagaaataatttattaagagtcacacatatcgataactttcaggtatcgttaataaacaatttatttacatactcacagattcctaaaaagaaagggtctgtgaaataagtccctaaatcacaaccaccggcttagccggtggtttgctttgaccctataagggtctgttaccggcactggagtctaaagactcatcgaaatagattcgccaaccgcaacatcatttactcactaagccctttcgggcttatctttatttgttacgttttactagctcacccgtgaacgggtcaatatactctttcagtgtcatttgatcatattccaaatcactctgtaactgatttgctatatattcctgtattttcttcgcattttttccatcgcatctacataatatcccctgcaccagaaatgtctgtttccgtatttgtacttcaaatttgcatggctttcgaatatcattaatgtactcttaccttttagatatccgacaaaatacgatacgcttatgcttggtggaatttcaaccaacatatgcacgtaatctggacatatttctgcttctacaatttttacaccttttcttttgcatagcatacttaatatatttgcaatatcttgcttaatctttccatatgctacttttcttctgtattttggtgttgatggcaactttagatggcaatacaaagaccttgttgcctgtctctgagttaccctgcatactgtcattgaccacattggggtctgaccgtgcgtccagcaaagggtatatagtccggtgggtggaagccccatcaaataagctgttaaccacagcatttgaagcgagtcttgagtctgttacggtaacgtgcaggctaagcgtagacagcaagatagcagggatagctatggagcaccgaaatcccaaagtatcagagggtcgacaccgtggtcagggtggaagacaatatatgcacttatcgttatggtgagattttgcatgcctctgcggtgttgttgaaactattcatgtcagacagggactatatgtcaactggagaggacctgcattttcttttcagagtgtgtaaatgaaaagtatgtccgccaaccaaaagaagaaagacaaacgaagtgcaggtagtcggaggcccgaacagtaccggtgaaggtatgaacaaaataaatactggagggaagtcgagagagaactgtgcctcgcagttctggcctgcgaaactatatcaaagaggaaacattagctatacacagagataggggaactaatggaaacgaaattggcgagaatatcacaattatcaaaagaaaacccagacatggtctttacatcactggggcatcttatcaataaggagatgcttgagaactgtcatgtccagatggatggaacgaaagccgtaggaatagatggagttaccaaagaagaatacggaagaaatctggaagaaaatctagaagcccttatagaaagtttgaagaagaaatcctataagcctaaaccagcaagactggtagaaataccaaaggacaatgggaagatgcggccacttagtatctactgttatgaagacaagctggtacaggaagcactgcgcaggatactggaagcagtattcgagccaatgttttatgatgagatgatgggattcagacccaacaggggctgccataaagcaatccgcaaactaaacataatgctggaaaggaaaccgacgaattatgttctggatgcggatataaaaggattcttccagcatcttgaccatgaatggattgtgcgttttatagaatcaaggatcaaagacccgaatattatccgccttgtcagacgaatgctgaaagcaggaattatgaataactatgaatttgaagcaacagaggaaggaagtggacaaggttccgtctgctctccgataatttcctgtatctatatgcactatgtgctgatgtggtggttcaaagaggtggtaacgccgatgttaaagggatatgcaggtctggtggtctatgctgatgattttgtggtgacattccaatacaaatcagatgcagtatggttctatgaacacttaaaacatagaatgggacactttggattaagccttgaagaagaaaagagcaggctgatagagttcggacgatacgcaaaggaaagatgcagtaaaagtggaacgaagccaggtacctttactttcctaggttttacacactactgttccaaaagcaagaatggtagattcagagtgaagaggaaaaccagtaagaagaagtttgcgaagaaatgtagagaaataaatcaactgatgggacacatgaaaacatggaaactgaaagagattactgctaaactcaatcagatactgactggttattaccattactatggaatcacagacaatacagaaagaataacagcatttcgataccacgtaatgaaaagtttattctactgtctaaatcggaggagtcaaaagaaaagctacaactgggtagaatttctgaatatgatagataacagctatccattggtaagaccccgaatatatgtcagtgtatataattgataaatgtgaacgattcgtttcgcaaagagccggatgcgggaaagccgcaagtccggattctgtgaggggcgtacgaccgcaaggggtgcgtctactcgacaccgaaaataaccgcaactggttacgatgtagtacttggaactggatccaagaaagaaaacggtgagacacgtccataccagtatggcaatcacaagaaactgaacctcaaagaaggtacagtaacagcaatattcaagaacgtatcaaagggaacatgggtagttggaatgcatgcattcaacagaacatccgaagacggaaagaaagtcttcagcccatggtcaaacctgaaaaaggctactgttaaataatccatttgggtaattaatacagattcctaaaaagaaggctccggtcattgcgatcggagtctttctttttaataaacctataccatatattctaacagaatcttatccttatattgctttctgctatttcaaggtgtatctgactcccctgcctgcacctgtttttttcaggattttcttttcaatcaggctgttcagagtacgtactgctttactcttttccatttctgctgctttctcaatttctgatcttgacattttttcttttcccttaaggatgttgaccagtatctgttcggcttcgttcaggtcatagttttcccttataacaggaagaattactttgatagaattagaaaaacactgatacgatggttttatcagtgcgttcctgtaagcatgattgatcctcatgattccggttccaaatttctcaatatatttcagccggaagaacacatttccgataataggatttctgagtatggatatctgaccattcaggtattcctcttcgctgatcccggcaggaagccctcccggagaactgatctcaatcctgtccgcatacatactgacttttatagatgccgggatatcccacattcgatggatcagagcattggctattgcttccctgaaggctttttccgggattttgtcaatacatttcctttcggctccctctattttttcatactgataatactttcggaacatctgaagtgttttttccaactgagaaagtatggaaatattttccagtgattccctgtccatgatctcatctatggtatcaccaaaacgtatgatatctattcccgtaaactgattatcatcagcaagaagtgcagctgcattattgaacccactctgatcagaatacagttcaagagtttttaaaatatctttattgatcttctcaatgcccatcacccggataaattctgtttccaatttagcaaaagtaagctgctgattgaatgaagtgatctcctcaaaagtctgattacagccctccaggatcaaccggttatattccagacgatccacttcaactgtagaagaatcatttcttttataagctttacctttatagagataaggcttatacctgccttcataaacagtgagcacgatcgtattttcctgtatctccagacggaactccggcacaggactgagactgtcattgatcttattctccagattcagacatccattcactggatctgttatgccgataacgttcccctgatcattgattccaaatataatctttccttcgccataattagcataggcactgatcgttttcagaaacgtgttagatgacagattttccttatattccaatgttctgctttccctcatgatacattttcctccacattttcaatcctttgaaacccaatattgatttgtaatatatagtataaaatcgttccaatcgaaatgcaacgatttcttttttcgtttcatatagaatacaacgatttatataatcatcaaatataattccgccgatcaacagccaacgtaattgtataattgtgaaataataaatattatacgtaaataatacagttataaatcatttcattttaacttttatttctacattgctctactcaaaacaatttttttccacaaaataaacctgtccaccacccaaaggggaactataatcatgacaaagattaaaaacacaaagaagggcatggcaaaaaagacattaagtatgtcacttgttgttgcaatgcttgctacttctaatgtgccggtatgggctgctgagttcagtgatggtacagacgttgctgtaacatccgacgcagaagcttcggtagttacagaaactccagcagatgatactgctgatgcattttcagctgaagaagaaactcctgttgttacagatgaaacagcagatgctgctacagaagttgttgaaaaaggtgatttaattcttgacaacgttactgtttctaaaagccagactttcggattaaacaagaaggtagctgtaacaggaaccattaaatataaagatggtaacgatattaaagtattagatgattattattttggatggagagtaaaaggcacaaacaatgcaatttttactgaccatatagctaatgataatacaactgataagatgtccttctatccggattttgtaggcggcgcaacttataagaaaaaaactacagcgtctgatgctaacgattggtttgaatccgctgccaaagacgttgactggagccagtatgcaggaaagacactggaattatatgtatataataacgaagcagatgataacatcaagatcgatccaacagttatcggcgagactacaattgagaagtgccctattgaaggtacactggtattagataaagataatacaaccaacaaacttacatataatggaaaagatttctattatactaatgcagacaaaaagactgatccaagtgataacgcagtaagattgacatcaaataaaacatcaactgttgcttctacaaatcctgctcttacaaatgtaaaaggtgacactactccaggaaaaaagggtgcgatatggaatgacgaaactgtattaaaatactttgatgtatctgcaagtaaaactgcaaaaaatgctggtgagaaattaactgtaacagcaacagctaaagaaaattctccatatattggtactgtaacaactgttgaaccacttaaagtagagccaaaattaattgataccagcaaagatttagttgcaactgttgatgcaggagttacttatccatatgctggtaaaaacgttaaagtagacttaacaaaagtacatttaaaggaatctgatgatttatctggagcagatttatcttcagctatcgagagtgcaacaactgtagattatggtataggtgctcatcaggttgctcttacaattaaaaaagatgctttaaagaactttagctttaaaaccccaaatgaaaaaacttttgtgttaaaaacatctaatgcaactgatgcaaataaagttactattacccagcgtgacttagaaaatgactgcattatttctattaagcatgatggaaaagtattagataagactactgttgctgattttgtaaaagactatcttgagatcaaggataaagacggtacttcattaaaagctacaacaacttctggctcaactacaaccgaacaagcaggtacaggattactcaaagataatgactatgttgttactgtttatgataaagacggaaaagttataacaggtgcattcactggtatcggtaaagcttacacgatttctgttacagctcagaaaaatactgctaatcctgctgcgcagacttgcatacgtggacaggaattaactgtttctgttacagataatattgtcggaaaagtttcctatactaatcaggcaaattataaaccagcttatacaggagaagcaatcaaaccaagcaaagctgatttaggtgctttggaaattactggattagatggaagaaaagttgaattccagtctgatcagtgggagtttacaggcaactacactaataatataaatgcaacaacctataacaaagatggttctattaaagctcaggcatatgctgaagttaagattttaggaaacaacagttatacaggacagacaatacaggttccatttgagattctgccattaactgttaccgaatcttctgttacagtaccgaaaactgttacttataataaaggctatggtgaagctaaagattataatgtacagttagtagtaacagcaaaagatgcaaccggaaagattgttaaaggcttaagtgctgacgattacactgtaaaatatgaataccttgataataatgctgcatcagctacacatccaacatcacctagtactgaaggaaccaatgaacttcacgactatatcaaagcaactattactgtcaagaatcctaactttgctggtgcaaagggacaagttgttaaaatccctatgactacaaaggaaaaatggtcagagatcgttgaaaaagctattaccagtgatatgattaagatcaatccatccagctatgtatataccggcggtaatattactcctacatatacagtactcgatggagcaatcgctctgtatgataaagctgaatataatgacaaaggtgagtatgagcaggtaagcattacaaacaataaagaagttggaaccggtacagtaactgtaaaaggtgttgctggaaaatattccggaactgcatctgctaactttacaatcacacctgcaaatacatcagatgtaaaagttacatttacagatgtcagtgaatgccagtacaccggaagacaggtcagaccgcgtacattcaaagctacattaaatggcaatgatgtcaccaaccagtttgagattgtaagctacggtgaaaatgtttccggaaaaggaactgttgtattaaaaccggttgatggaaataagaatttcacaggctccaacattacagtagactttaacatcatcaaagaatatgtaaaagcagacttaaatgtatttaattccaatggtgtaaatgttactgtagctaattcagcatctaatgtaaagggctataaagtaactaatgaaaaagcaacaaactattccggagattcctttgactttgatggaaccgctaagacatttgcaagtgaagtactgaaaaatatttccaagacagatgccaatggtagcacaacagcagtttcaaaagcaaaagagtctgatttcgaaattaaatatgtagataatatttctggtaaaaatacaggaatgaaagacagcagtaacaatagttataatattgcatatgtatatgttgttgcaaaagatggtactggttatacaggaacaaagtctttcacaacagctgatggaacaaccattaaaggtgttgttgattatgtagcattcgctatcaagaatgtagcattcgtaaaacagaatgtttatgtccagaatgcaacatatgctggtggacttccagttaaacctagcgtacttgttcagattaacggaaatactcttgttgaaggtaaagattatacccttaccttagatgcaaatggtcataatgatccaagtggtgttaattttgtaaatgttacagacggtaaagtttacaaagtaacagttaccggtatcaatggatatactggttcttcagtaggttctacagcagctgacgctcttacatggggcattgacaagaaagatatcaaagactgtgatgttaaggttacaaatggtgtcgtaactgtcatgaacggatatattcctgttccaaccacagaatatacatcaaagaacaacggagacggaacctacacagtaacagctaacagcacatccaagaactacacaggttccaagtctgttaaagctgatggaaaagccgcagatgaaaaaccagatgctccaatgatcagcagcgttaaagttgttggcaacaaggcaactgcaatcctttccggtgattctgatggtgctgcaggttacgactatgtaatctctacagaccgtgactgcatcacaaacaaagactacgattctgtaaacaagaatcaggttcagacctctactacattcaaatatgtacagcagggaacctactacgcatactgccacgcttggaaacgtgacgcaaacggtaagaaagtattcagcgactggtctaacgcatatccattcgttgtatccgcaatcacaccggacgctccagttatcacaaacgttaaagtaagcggatctactatcaaagtaacatacaaagcagctgcaaatgcaactggttacgacgtagtacttggaacagattccaagaaagaaaacggtgagacacgtccataccactatggcgatcacaaagtactgaacctcaaagaaggtacagtaacagcaacattcaagaaggtaccaaagggaacatgggtagttggaatgcatgcattcaacagaacatccgaagatggaaagaaagtcttcagcccatggtcaaacctgaaaaaagcaactataaaataagtcctattgggtaaagaatattgcattagctgaatttcagcaagatatggcacttgatatgaaagtgccatatcttaaatgcaatactatttttcaataggtttttttatattattttgaacaaataaaatttataatatttaagggggattataatatggctacgtttaaattaaaaacagacgatcagataaaatctgttacttataacaaatatattatatcatcagatgaagataatatttttgttaaattatatacagatatagatatgattgccagagttcgtatcagtattggtgacaatatttttgagcagattgaagaatatctggcagaatctttagataatgcagctcttaataaaaatattttttccattcgttacgataaaatacgctgctatatatatattggaacaactattgatactgaaaagcaatatacaggagaagttgatctttttgatttttaaacccaatttaccttcttgataggtgtatattattaatctaatgaggaccacatgggggtccacattggggtctgaccatcgaaaataaccggaaagataataatctccacataaaagaactctaaaatttatataacataaaattccttacccatacataaaaccatcccagctatatgaataatgtacatagtcgggatagtttttattgtgaattattactctgtctattaatttcctacaataagtttacactatcaaatataggttttctcttgactgttgatggcaactttagatggcaatacaaagaccttgttgcctgtctctgagttaccctgtatactgtcattaatacagtaaagaaagggatcccagagcatcctcctgacaagacgtatactctgggatcatgattttgaaaccatgattattatatcctcgtacaaggaagagcgttcgtcttcggagaatgccatagttaaagatgaattcatttaagtggagtcgaagcaaaattaaataatttatcgtttcacagatttctgagatgagtattcactgtattgttttttgccgtttacatttttataagcacgtattttatacttatacagggtacctttttccaattttctgtctgtgtaactcgtagaatttacagatgcaattttcttccagctgtttcctgaagtccggtatatctcgtatcctgttgcaccggtagtttttttccaggttaattttacatctgtgctgccggattttttaactgatttaagaactggcttccggagctggattttgaaattcagttttaaactgccgctataggtacctttacctttgattattacagttgcagttccgacattgatattattcttgtaggtcagagtataatcaatatctttaaaaaggtatgtgccacttgctgagtctactgagacatctactgacggcgtaatcgcttttccggtatatgtataagtactgtctttcatccgggcagcacattttgagattgaggcagactgtggttttaatgtaaatgatacggaatctttctctgcccaggtatcgtaaagattaaagactaaataataaacagtgttaggttttaaggagcaggcttttccgttctgaacatatccgaaatagccattccagtcgaggatgccattgcgttctgtataaatagaaattcctgcccgctgggagttatattgctgaaaatctccggatacaacatatcttgttgattttccggttttaatacgtgcgcagacttcacgcctgccgacagataaggattttgtaccgctattgttgatcgtaggcattgcggaagattttttgacagatacatttttgatcactgtttctttatcagagccctgaattccgatgtgtacatcataggtacctgcatcagggtattcactttttccattataaataacgtagcgttgcacgctcataccgtatttgttttttccgttgcgggaagaaatgatttctgattctccattgacgtaattaatttttatttttccattccatctttcacctatgccaactttttcttttgcagtaaaaccgcctctgttgaaatctacaggcgtataataggtagttttctgactgaaatcgccgaccggttctatggaggcaatgttataagcgagttctgcactgatgtgggcttcagtttcattaaagaattctgtatttaatatggtatatttatgaccggcctgcaaatcaaaaacaccgttttgctcagatacattttttccggattcatcaaacagaaaagccggatgatcttctcctgataaaattgcatagctgccagtggtttccggagtaaaaaatccatatgctgatctgtcccagattttagaagttgcttcatatctgtcaggacctgtttttgtcaggacaggtgtttcatccggaacccggatggagatgggaactttcacatcaaccccttcgctatagtctatcagagcataatattcaccgggtcccagataaacatcgtaatcattatctgtaatctgtttaaagttgctgtccagaaggcttcctgtatacaggttgcctatagagtcagccatccagtccgacagacattcatccattgttgcttcgcaggttttggtatcatcgctcagttttaatattaagcctgtaagatcaatggtgtttataccggtaatactacctaacaaataaggggatttatcaggtcctttgaccagctccagtttatcaggtccaataacttcatcttcatcatcaagtgtcgcagactgttcattggagctgacatcaggattttctgataactcactgcttttttcttccggctgcagtattttgctgtctgttacttcgtctgtactgtccgaaaagctttctgttgccggttcgggacaggtaaattcggctccggataccggaacgaaaaatgtgctgactaatgcagcggatagaatgacagttaaaacttttttcttcatcgcatatacctcctgtgctgattattagtatcataaatcctgaatgcagatttatgatattgggacacttatattatagtgatttttacattttttgtcatcaaaaataatccggcatgcaccggggacagtatcctcttataaaacacggttggatctatgggaaaaaacaaggatattgctttctgctattttaaggtgtatctgattcccctgcctgcacctgtttttttcaggattttcttttcaatcaggctgttcagagtacgtactgctttactcttttccatttctgctgctttctcaatttctgatcttgacattttttcttttcccttaaggatgttgaccagtatctgttcggcttcgttcaggtcatagttttcccttataacaggaagaattactttgatagaattagaaaaacactgatacgatggttttatcagtgcgttcctgtaagcatgattgatcctcatgattccggttccaaatttctcaatatatttcagccggaagaacacatttccgataataggatttctgagtatggatatctgaccattcaggtattcctcttcgctgattccggcaggaagccctcccggagaactgatctcaatcctgtccgcatacatactgacttttatagatgccgggatatcccacattcgatggatcagagcattggctattgcttccctgaaggctttttccgggattttgtcaatacatttcctttcggctccctctattttttcatactgataatactttcggaacatctgaagtgttttttccaactgagaaagtatggaaatattttccagtgattccctgtccatgatctcatctatggtatcaccaaaacgtatgatatctattcccgtaaactgattatcatcagcaagaagtgcagctgcattattgaacccactctgatcagaatacagttcaagagtttttaaaatatctttattgatcttctcaatgcccatcacccggataaattctgtttccaatttagcaaaagtaagctgctgattgaatgaagtgatctcctcaaaagtctgattacagccctccaggatcaaccggttatattccagacgatccacttcaactgtagaagaatcatttcttttataagctttacctttatagagataaggcttatacctgccttcataaacagtgagcacgatcgtattctcctgtatctccagacggaactccggcacaggactgagactgtcgttgatcttattctccagattcaggcatccgttcactggatctgttatgccgatgatgttcccctgatcattgattccaaatataatctttccttcgccataattagcataggcactgatcgttttcagaaacgtgttagatgacagattttccttatattccaatgttctgctttccctcatgatacattctcctccacattttcaaccctttgaaacccaatattgatttgtaatatatagtataaaatcgttccaatcgaaatgcaacgatttcttttttcgtttcatatagaatacaacgatttatataatcatcaaatataattccgccgatcaacagccaacgtaattgtataattgtgaaataataaatattatacgtaaataatacagttataaatcatttcattttaacttttatttctatattgctctactcaaaacaatttttttccacaaaatcaacctgtccaccacccaaaggggaactataatcatgacaaagattaaaaacacaaagaagggcatggcaaaaaagacattaagtatgtcacttgttgttgcaatgcttgctacttctaatgtgccggtatgggctgctgagttcagcgatggtacagatgctgctgtagctactgaagctccggctgcggaaacattctctgatgaaactgctgaagctccggttgtagacaatgaagaggtcgcaccagttgcagaagctgcgacaaacaataagttaaatgcaagtgttgatttttcatttggttcagacgcagtaaaaaataattctgtaacttgggatatctttaaacagaaaaaattaactgcaacattaaatgttacttctggagaagcaaaattaaccgatttcacagaagtaaaagccctgtggaaggtagatggaaatcaggcagacgctaatgttacaactgttacaactggcaaggagactgttgaaattcttccaacagcagatatggcagaagcaggaagtaaacttactctttacatttatgccaaagatgcaaatggtattgcgtggagctatacatcagatcctatttctgttgaaaaagtagacatcaacaaggtgaatgacagtgctgatgttaaagttgcttctactggtattggttacgatggagaagatcatactcctgtcaactccatgatcgaacttccaccaacctggacaaacaatggctgggataaaaacgatttcactatcggtgaagtgtctggtgataccaagaatgttacagatgatggtgttactgtaactttagttcctaaaaaagctggatttactggtgtattaacacgtaaatatcagattaatccattaacattaacttccaaaaatattggtgaatatatcaaagcagaagttgtaaataaaacagttgcatatacaggaaatacaattgctcctaaaaacacagatgtaaaattaactgataaaaaaacaggcgctgatttatcaggatatattgattctgttactggaatttcccagaaagctgattatcaagcaggaaaatctcataagcttataatcaatcttaaagcaagcaatgatgatggaaaagtaaaaaattataccattaatactagcagcgtacctaatatttatacagaaaatacactgactattacacagagaaatttaaacactgttaatattgtggttccagaaattccaagtagtacaccatatacccttagtggtgtaaaattctacgatacaacaactaacgatgagttaaaactttcatctgatgttacatttgacacaagtgcaattaatggagctggaacatatactgtaaaagtttctcctaattctggaaatgttacaggtgaaacaacagctactgtacgtgttgcagatacatcattaagtggcgctacatttgcaaatgattatgcaacagctgctgaggaatatactggtgaacaaattgtaaaagacgttactaaactgggagatgtatatatcagcggtaagaaattggattcttccaattacaagattgagtttggtaaaaacgttgatgccggaaaagacaaaggtgttatccgcattgtaggacagaacagttataaaaacagtgtggcagaggttacatttaacattaataaagccgttgtatcagccgatactgttacttacaacaaagttgtagaaaagaaagatactgctacaccatctgcatacaaagatgctatcggacttgttgtaaaggctaaaaatgctaacggtaaagaatttacattagtagaaggtactgactatacagttaaatatgaattcaagaacagctctggcaataatggaacaggtgcagttggcgatactgtaaagacaataatcacagtaaaaggtaacagtaattatacagcagattcaacatcatcaggattaataggaaaaacagatacaacacttccagtttctccaaagatcactaacaaggtaatcaaagatgccgatatccgcctgaaacagacctcctatacatatacaggtgcaggaatcacacctaaatatgatgtagtggttgacggaagagttcttgtagaaggtactgattacgaagtaagttctatttctaagaacgtaaatgttggtactgctacattagagatcgttggtaagggcaattacagtgcagatgcaaaggcaaaagcaacattctcaatcgttgcagcggatgcatccaaacttacaggtgttatcgcaagccagccatatacaggatatgcaattgatccagtagcaagccagatcgatctgactcttgatggagtaaagatcaatgtaaatgataactttacattatcctatggcgagaatattaagatcggtgaaggaactgttactcttacaccaaagaacgctaactttacaggaaccaaaacaatcaacttcaagatttccggaaagatgcttagtggtggtacattaaaatactatgatgcaaatggattgactactgatttagatggtactgattatacaggcaaagaaatcgtagcagcaaaaacagtatttaatactgcaaacacaagacttaataacggcaagttaactgataaattaacagaaggtacagactacgaaatcaaatacgtagataatgtttatggtaaagctgaaaaaggagctggtgcaactactcagaagggtgcagttttagttattgcaaaaggaaattatgcaggtaactatacagattctaaaaaagcatttgtagttgatggtatctatacagatgcaaatggaaataagatcacaaatgttgtttatgcagaacagtttggaattgatccagagagtgtagcaaaatcaaatgtatccattaaaaacggtacttatgcagctggacttcttgtaaaacctactgttgttattaccgtaaaaggaagaacactggtagaaggcatcgattatgatctggatctcgctggtaacaaagatcttgtaaatgcaacagagaaaaaatctctgactgtaacagtcgtacctaagaatggatatagaggaactggtcttgcattctcttggggaattgataaattcgatctggctaatgcagatgtatctgtaaaagacggaaacgtaactgtaaaatgtggaagcattactgtaccggctacagattacactgtaacaaaagatgcagcagcagataaagttactgtaacagcagcaaaagacagcaagaactatactggttctaagacagtaagtgctgatgttgccccggaagacaaaccggatgctccaatgatcagcaatgtaaaagttgttggcaacaaagcaactgtgatcctttctggcgaagcaagtggtgctgctggttacgattatgtaatctctacagaccgtgactgcatcacaaacaaagcttatgatggtgtaagcaagaaccaggctacaacttctacatctttcaagtatgtacagcagggaacctactacgcatactgccatgcttggaaacgtgacgaaaatggcaagaaggtattcagtgactggtccaacgcatatccattcgttgtatctgcaatcacaccggatgcaccggttatcacagatgttaaagttaacggaactacaatcaaagtaacatacaaagcagctgcaaatgcaactggttacgacgtagtacttggaacatcctccaagaaagataacggcgagactcgtccatacaactatggtgctcacaagaaactgaacctcaaagaaggtacagtaacagcaacattcaagaacgtaccaaagggaacatgggtagttggaatgcatgcattcaacagaacatccgaagacggaaagaaagtcttcagcccatggtcaaacctgaaaaaagctactgttaaataatccatttgggtaaataatacagattcctaaaaagaaagctccagtcgccacgactggagtttttctttttagaacatcacaatagttgaaagtatatctggagaatttatatgaaaaaatacttatgattggaaatggatttgatctggctcatggcttgccaacatcatataaaaatttcttgaaattctgcgaaattattaacaatttctttctctatcaaactgtgaatgctgaaacagcaaatcaaaatgtagaaaactattttggggaatatacaacaataaaacaaagattacgtaaagagttttctacattctacattcgtcctagagcgtgtctgaaaaataaaaattgcacaaaacgcatgttttatttccctttttcatgataaaataaagaaaaaggggtgttcactatgttgagacgatatgagttgactgatgaagaatggcttcgcattgaacctttattacctcctgaaaatactggaaaacaaggacgtccaaggaaagacaatcgtatcattatgaatggaattgtatggcttgcatgtagtggggcaccttggcacgatcttcctgaacgttatggttcatggaaaactgtctataaccgattccgaaaatggatcgatgatggtatccttgataatattttccgtattttaagtcttgaagcagaattggaagaattatccattgatgcttctattatccaggcgcactagcatagtgccggtgcaaaaaaagggggccttcaaatgaaatcgggcatagccgtggaggagccagcaccaaaatccatgcgacagtagatgcctatggatatccagtttatttaatgatcagtgagggacagcgtaatgatatcaattatgcaatccctttgctcgatcaaattgaaataaacggaagcaatgtgttagctgaccgaggatatgacagtaataaattacttgattatgtgtacgcccgcggtggagagccaaccattccatcccgaaagggagctaaatttgaacgtcattgtgattggtggttatacaaagaacgccatttagtagaaaagtattttctgaaattaaaagcattccgacgaatcgctacacgttatgacaaattagctacaacctacttgggatttatttgtatcgcctcaatattaatttggttaaaataaacaatttaaaatgtttttcagacacgctctagtacatcgttttcgaaataactataccactcacttgtctgcgaatccgattgcacaggtctaaaagcctcagcgtagcccgctacgcctgcgtttttataccagcacactcgaatccgcatcctacgcgattggtatagttatttacgaaacgctgtactagtataactgaggattatctctcttatttatatgtactttggcagattgaaaggaaaaagctatgactgataacagatttattttaaatagtgcatatgacttaaatcaaatgcaagaggctgattctatatcttcctactatcactctaatgcacctcttcagatggaaaatgtatgtaatagagttgttatcttgttaacaatgtgtgtgaacaaagagttaagtattattttggcaaatacagatgtttctgaaaaggattattttatttttttaaaaaaaacctatactgaagtttgtttaaaatatcaaaatataaataaacgaattataactaaattagaaatagatatcagtaagcaaaaagaatttcttgagtatctaaactattttgtcgtttgcttgttgagtggtataaaatatattgaaaaaaagaaagatgaaaagtggcatcaatatgatgaacaaaatgaatggaatacgcgttttagacgagaagaacgagtaagagactacatgaagggacttatttctaataacggaaaattcacaaagtttacattgaaaaataaaattgaaattccatatatgtatgtattggcgtgggatttaacaccgttatttaaaaaattttttgatacatatgaaccatatggagataatgatcagtcttattatggcaacctatgtagaaatactagcatagagttaagatatatcagtgataatttgcttgacatattaatatatggacaacaaacagataaagaacgttttagcgagacaagtccagataaattactgaaaatatataaaacaattacatttaaaaagttattgccaacaatatgctttggagaaagagtaaattataatcatgatttgcttaatccagatggagatatcatagcaaaaaagacacatcaacttccatttataaaaaaagaaatccttcagagcattccattacttccgatgcaagttgataaagaaatttataatcctgagaaatctacaagaatgatgcttgatttattgaaggagaaaaataaaacaaaagattatttagaatcagatatactttatttaaaaaatagtattgtgaatttttgtgaattattattggactgggtttgggaaacggagattaattttttacgtattgatattgctaaaacagaggaatattttatcaatattattaaatttgctaagaccttaccaagaaatgataatcctgaatccaaagaaacatatctgaaaagtcttttgtctgtaattgcaaaaatgtgggatactacgcagttaaataacattgaagtaatagatggtaagccaaaaacatacattttatatgcatgtttttcagttctcaaattaactcgtaattggaacgaacataatctaattcatgatgtaagttttacatttgttgcctttgcttttatcatttctttaagatatatttttgacattgataaattatgtacagaaatgaggaataattatttatatgaagaagaaaaattttttcgttttttcaaagaatcaccattggattattctgaatataacatatcggaaatagaaaaagaatataaattaacttgttgtgctagataaaataaaatataaagaaacttcaacaaaatgtgctatcctatttgtagggaatacagcgaaaggaggcatcattatgttgaagttccaagataataataccactgttattgcaacttttgaagactttattttaaccgcttacgttattattgacgaattgtatcatcagtttgcacctccagaagttaccagacgacggcatatcctgaatgcaaaattatctgactcagaaatcattactatcagtctctgtggagaattggcaggcgttgattctgagaatgcatggttttcttttgtgaaacgaaactacaggcatctttttccgcagctttgcagcagaagtcgttttaacagaacgagacgcgccctgatacagataacagaattgttacgacaaaaaatgatttccgtattcccaattccagtcagttcctattacatcatcgacagttttccacttgcagtctgtaaatttgggcgtgcacgatattgtaaagcatttcgtggccatggtgctgattatggaaaatgtccttctaaaaaagaaacctattatggatataaagtacatgcattaattacattagaaggatacattgcatcatttgagatcacaccggcatctacagatgatcgtgaaggattacgtgatctggcagaccattggtctaatgttacaattttagcggataaaggctatgttggaaaaaacatgaaacaggaaatgcaggaaaaaaatatctgtctttttgctctgaaacgttccaacagtaaggaaaattggccgaaatccgtacgtcagttaatattcaaactgagaaggcgggtagaaaccgtattctctcaattgagtggtcagttaaatgcagaaagagtgttagccaaaagctttcaggggttatgtacccgtctggttaataaagtactggcatacaatctctgtattgcattgaatagtattttcggtgaaacctgtgaacttggaaaaatcaaaaaattgatattctaaaaattttattttttaatatctgtagggattctttgcggttttacaggttttcacgtaatctatttgaagtagcacaataggttaaattactctataataatgtatctcaaagtgcattttataataatcataattgggcacaaaaaaagttcccagaaacagactggccaggtgaccctcatcaagtactaagtacagctggttatagtgaaagtttaataaaagaacaaatgacagaaaatgaaatatatttgacattttggttaactattcatatgggaaaaaaacaaaatcaaattataaaattgtcaaaatcaacagacaaaaatatttttatactgttaacggatatttatgaatatcaaaaaaaatcgtttctcttgtcgaattaaatgtaagtaggatggtataaataccgaataatcatcatatgttattgacagtcttctggcttagtcgaaagaactgccagaacagtgccgtttaaaaaggaacagaaaaaagtgcttcaaatgagtattccaatgcaatagtgcatgctttccaaagattcagagcacccttttccggaaaaatagtgcatatctttccggagcagagtgcagtcatttagttagtattcatcaggaatagctattccgtgttctgtaagaagtacttgtaaacggtcaatatatttttttaagtgctggatttctatccaattatcatgacacagttcatcagcttcctctaattcgtggagggttatttcataatccgtaaacttgatgcatttatggtctttgctgaaggcacaatagttagtcatggacagctcctttccgggaagcgttaatgccatgacgttccctcatggatacacggccatcaatcatcacctcagaccacattggggtctgaccatcgaaaataaccggaaagataataatctccacataaaatgattctaaaatttgtataacatagaattcattatcaatatataaaaccatcccaactataagaatgagctcaatagtcgggatggttttaattgcagtcagcccggcggcggggcttaccaccgaaaataatctattattcttttaaccgcatatcaaatgctggacgcatatattctactgtctggatgggtctgaccaccgaaaatgcaagtccggattctgtgaggggcgtacgaccgcaaggggtgcgtctactcgacatcgaaaataaccgcaactggttacgatgtagtacttggaacatcttccaagaaagaaaacggtgagacacgtccataccagtatggcaatcgcaagaaactgaacctcaaagaaggtacagtaacagcaacattcaagaacgtaccaaagggaacatgggtagttggaatgcatgcattcaacagaacatccgaagacggaaagaaagtcttcagcccatggtcaaacctgaaaaaggctactgttaaataatccatttgggtaattaatacagattcctaaaaagaaggctccggtcattgcgatcggagtctttctttttaataaacctataccatatattctaacagaatcttatccttatattgctttctgctatttcaaggtgtatctgactcccctgcctgcacctgtttttttcaggattttcttttcaatcaggctgttcagagtacgtactgctttactcttttccatttctgctgctttctcaatttctgatcttgacattttttcttttcccttaaggatgttgaccagtatctgttcggcttcgttcaggtcatagttttcccttataacaggaagaattactttgatagaattagaaaaacactgatacgatggttttatcagtgcgttcctgtaagcatgattgatcctcatgattccggttccaaatttctcaatatatttcagccggaagaacacatttccgataataggatttctgagtatggatatctgaccattcaggtattcctcttcgctgattccggcaggaagccctcccggagaactgatctcaatactgtccgcatacatactgacttttatagatgccgggatatcccacattcgatggatcagagcattggctattgcttccctgaaggctttttccgggattttgtcaatacatttcctttcggctccctctattttttcatactgataatactttcggaacatctgaagtgttttttccaactgagaaagtatggaaatattttccagtgattccctgtccatgatctcatctatggtatcaccaaaacgtatgatatctattcccgtaaactgattatcatcagcaagaagtgcagctgcattattgaacccactctgatcagaatacagttcaagagtttttaaaatatctttattgatcttctcaatgcccatcacccggataaattctgtttccaatttagcaaaagtaagctgctgattgaatgaagtgatctcctcaaaagtctgattacagccctccaggatcaaccggttatattccagacgatccacttcaactgtagaagaatcatttcttttataagctttacctttatagagataaggtttatacctgccttcataaacagtgagcacgatcgtattctcctgtatctccagacggaactccggcacaggactgagactgtcgttgatcttattctccagattcaagcatccgttcacgggatctgttatgccgatgatgttcccctgatcattgattccaaatataatctttccttcgccataattagcataggcactgattgttttcagaaacgtattagatgacagattttccttatattccaatgttctgctttccctcatgatacattctcctccacattttcaaccctttgaaacccaatattgatttgtaatatatagtataaaatcgttccaatcgaaatgcaacgatttcttttttcgtttcatatagaatacaacgatttatataatcatcaaatataattccgccgatcaacagccaacgtaattgtataattgtgaaataataaatattatacgtaaataatacagttataaatcatttcattttaacttttatttctatattgctctactcaaaacaatttttttccacaaaatcaacctgtccaccacccaaaggggaactataatcatgacaaagattaaaaacacgaagaaaggcatggctaagaaaaccttaagtatgtctctcgtcgttgcaatgctggcaacctctaacgtgccggtttgggctgctgagttcagtgatggaagtgattcagtagttgaaacaacagcacctgcagcagaaacattttctgatgaaacaagtgcatcagcttctgaagaaactgaaactccagttgtaacagatgaggctgaagtttctgctactgcaacagtagtagagtcaaatgaccttaaaatcaatgtaagtgtttctgaatcagcaacatttgcaaaagatgctgtaaaagtatctggtactattttaaagaaagatggtactgcattaaataacttcaagtatggctggcgtgtagctggtcaggataccaatatttatacacgtgaaatcacagatggtgatgtaacaaaaatgggattccgtcctgatttcaaaacttcaggtgatgtagactgggatcagtatgttggacagaaacttgaactgtatattttcaataatggaactgaagctgatgaaaccaaaattaatcctgtaaaaatcggaagtacaattatcaataagttagatatgtcagatgctcagttggcattagaaacatataatggaacagatgttgtgacatataatggaaaagaatattattttggtgatactgctaaaggtaactcagtaacattagctagtaccgcactgacaaatgccccagatgtagcaccaggaaatggtcaatggacaaaagaaaatgtattgaaatattttgatatttcagcatctggaacagctaaaaatgcaggtgatgtattaactgttactgcaacagctaagaaagattctccatatactggaacagctaaagatgtaactatccgtgtatgccaaaaagatttcgatgatgctttaaaagctggacagattacagtagaaagtgctgctggattatcttatcagtatacaggtgatcagattaaagttcctaatgataagattacattaaaggaaacatctgcattatctggtgctgatttatctgcagcagtaggaagtgcttacacagaagatgccggaaatccatcaaaaggattcacagagcagaaggttaaagtatatttagatgcaacaaaacttcctaacttttcaaatgttccaaaatcaattcttgcttctaaaaatacagtaactgttaaaaagagagacttagcttctgattgcgtgatttcattaggtgaaatttggggaactacagtaattcctctggacaaaataccaactggaacttatgtagatgatcttagtgattatcttgtattcaaagacaaagaaggaaatcttttaaatttaaatgatggatttgattatactgttacagtaaagaaaaatggtgttcaggtaacaaatgcattagaatctgttggtacgtatgaacttacagtatcagcaacttctacagatggagttacatttgatggtaactgcattaatagccagacattcaaagttattgtttcagataatgcgatgtatgcttatggatacagtgcaaataactatgaatcttattatactggttctgaagtgaaaccgtcacaggctgatttaggtgcagtagtaatcccaaatagtgattatactccagaacatccattagcttccgatgcatacaaaattgttggatacaagaataatgtcaatgcaagaagtacaacagctctggaaaaagcaccagctgttacaattgagattacagaaggtaaatataaaggaaacaaagtagatgttctttttgacatcaaaccattaaatgtaaagccagaatacataacagtacctgagacaatctcttataataaaggttataaaaatgccaaagagtacaatgttccagttaaagttgttgccaaggatccaagtggcaaaattgtaaaagaactgacggattctgattataccgtatcttacaaatatgttgatggtacaaacaaaccggttaataacacaattgcccagaacgaattgcatgataaaatccgttctactatcactatcaaaaatgcaaactttgttggtaatggtactgaagtaacagctgcaaaagacagtgagattgttgcaaaatcccttacagattctatgcttacaattgcacctgctacctatacttacactggaggtaacattgttccagaacttcttgtaaaagatggtgcatatgttttatatgaaggtaaagaaaatgatggtaaaggcgaatatgaagtcaccagcattaccaataaccttaatgttggaactggaaaagtaacaatcaaaggtatcaatgatttatattcaggaactgcatctgcaacatttactattacagctgcaaatacatctgatgtaaaagtagaaattgcaaaagaacagtatactggaaaagcaattcgtcctcgtaaatttaaagcaacattaaatggtaacgatgttacggatcagtttgaaattgttgattacggtgaaaacgttaatgccggtaaaggtactgttgtattaaaaccagttgatggaaataaaaacttcactggcggtaatattactgctgaattcgatatctacaaagaagctgtagctggaacaattgcagtatacgatgctaatggtgaaaatgtaacaagcaaatatgctactgatggaaagactttaaaaacaaatcagcagtcatttacctttgacggcaatgaacagatatttgctactgaaaaactgactcttaccacaaaagatacaacagctaaagcatctgactttgagattaagtatgccgaaaatgtaacaggtatcccgtcttctcttaaatctggaaatgataaatataatattgcatatgtatatgcagtagctaaagaaggctctggatttacaggtaatgatgaaatagttctggcagatggcactacaatcaaaaatgttgttgctaaaacagcttttcttatcaaaaatgtatacttcaatgctcagaatgtcagcgtgaaaaatgctacttacgctggaggacttcctgttaaacctgaagtgcttgtccagatcaaaggaagaactcttgtagaaggcaaagattataaactgactttaagcggtgcttctgttggtgaaaattatacagatgtaacagatggaaaagtttatggcgttacagttactggtattggtggatatgttggttcagaggttaaattagtaaaaccggcttcctggggaattgataagaaagatattaaggattgtgatgttaaggccattgatggtgtaataactgttatgaacggatatattccagttccaactacagaatatacatccaagaacaacggtgacggaacatacacagtaacagctaacagcgcatctaagaactacacaggttccaagacagttactgctcagggcaaagctgaaaacgagaaaccagatgctccaatgatcagcagcgttaaagttgttggaaacaaagcaactgcaatcctttccggtgattctgaaggtgctgcaggttacgattatgtaatctctacagaccgcgactgcatcacaaacaaagactatgattccgtaaacaagaatcaggttcagacttctactacattcaaatatgtacagcagggaacctactacgcatactgccacgcttggaaacgtgacgagaacggtaagaaggtattcagcgactggtctaacgcatatccattcgttgtatccgcaatcacaccggacgctccagttatcacaaacgttaaagtaagcggatctactattaaagtaacatacaaagcagctgcaaatgcaactggttacgatgtagtactgggaactggctccaagaaagaaaacggtgagacacgtccataccagtatggcaatcacaagaaactgaacctcaaagaaggtacagtaacagcaacattcaagaacgtaccaaagggaacatgggtagttggaatgcatgcattcaacagaacatccgaagacggaaagaaagtcttcagcccatggtcaaacctgaaaaaagctactgttaaataatccatttgggtaattaatacagattcctaaaaagaaggctccggtcattgcgaccggagcctttctttttaggaactttttcccacatccccagataatcttatgatataatcaacatacagaaccatcacttaaaatatctctatatgaaaggaagtcatgtatgaagaaaagaaaatcatgttttatctggctcttgtgtattcttctcctggtcacagctttacctgctgtagattttacagatgtccaggcagcatctgtcagcagtactttcaccggatggaaaaccttcggtggaaaaaaatactattataagaatggcaaaaagctgacagacctgcacaaaatcggaaagtattattactgttttgcagcagacggtaccatgcttacaggatggaaccgtattcataatcgtttcaggtattttggtaaacagaccggaagaatgcgtatcaatcagactgtaaatggacgaaagatcaacagtaaaggtgtctggactcctgttgttgtactggatccggggcattctgctgttgttgccggtggttatgaacctcttgggcctggttccagtcagctaaaggagaaagatacgtccggaacccagggtgttgctacaggtgtggaggaatataagctcaacctgagcattggtcttcagctaagaacccttcttcagaaaagagggtttaaggtaataatgaccagaaccaacagtaaagtagctctcagctgtattgaccgtgcaaaagtggcaaataaggcaaaagcagatgcgtatatccgtatccatgccaatggaagtgataattcctctatcagtggagcactgactatctgtacaaccagaaacagtccttatatttcatctatgtacagaaaaaacaaagctctctctgaggctgtacttaatgcatatgtggcagctacaggatgcagaaaagaatacgtctgggaaacagactctatgaccggaaataactggagtaaagttccgacaacgattatcgagatgggatatatgagtaatccttccgaagaccgccgtatgcagcagaattcttatcagaaaaaaatggtacggggaattgcaaatggaattgagaattacctgatcaaatagccttgcttttgtggcacagacagtttatactggactgaatgggtataaaaaataattggaggatttttcaaatgaaaattgcagtaacatacgataatggagagatttttcagcattttggaaaaacagagtcttttaaagtttatgaagtggaagacaacaaagtagtttccagtgaagtgatcggttctaacggtacaggacatggtgcacttgcaggtctgcttgctgagcagggtgtaaatgttctgatctgcggtggtatcggcggtggtgctcagacagctctcacagaggcaggaatcgaattatgcgccggggcccagggaaatactgatcaggcagttgaaagttatttaaaaggcgaattagtatcttccggagctaactgcgaccatcaccatcatgaagaaggtcattcctgtggcagccatgaggagggacactcctgtggagacagctgcggtggcggatgcggtggatgtggcggatcacagccacagcttacaggacgcaatgtaggaaaaacctgccgcacacattacagaggaactttcaatgacggaacacagtttgattcttcttacgaccgtggcgaaccgctggaattcatctgcggtgcaggccagatgatcagagggtttgatgctgctgtagctgacatggaagttggtcagatcattgatgttcaccttatgcctgaagaagcatacggtatggcagatccaaacgctatcttcactatggaaatcgcccagcttccaggttccgaagatctgacagttggccagcaggtatatctgtcaaatcagttcggtcagccattccctgttaaagtgacagctaaggatgagaaaaacattacatttgatgcaaaccacgaaatggctggaaaagaacttaacttcaagattgaattagtagaagtgaaataagacaaatactcagggtagcctcccggcaaagattttgccgatgagactgccctgttttatactttatttaccaaagtgatagtgctttttgtagttttataatttacgagtaaaaatttactgtttttgtgggcttactgtatattcgcttaccgtttactgtcttaaaagctcttacataataattataaacccagtacatgcctgtttgggaatcataagcctttgtgtctttccaggttgagacagaggacttcactgttttggcagcggaaccattgcggtaaattacatatccggaagcaccggctacttttgtccaggaaacctctgtaccaccgttactcattttacatgaaaccttagatggagccgggacagcagcttttcttgatttcaccgctgaaaatttagaatatttgttttttccacttgcgttggttccataagcacggactttaaatgaataggttacgcccggtactacagctgcatcgaaactgacagctcctgttttcagggtttttatccgcttataagaagactgggaatctgtcttgcagtaaatctggtatcctttggcacccggaacctttttccaggttaaatgtatttgatctgcagatttctgggaaagtttcagcacaggttttgtcagtggtgtgttgttctcagatacctttaccgtcacttgacactgggtctgaaaatctccggcagaagcagtgattactgcctgaccatagccgttcccctgaatggttccatcctctgagacagacgcaatcccaggattactgcttgtccagaccacatcttttacatcatcagagttggatggtgtaaaggaaggcgtgagtttttgtgtattgccttcgtcaattgtcagatttctctggttcagagcaattccattaagtggaattgttactacagggatttcatacaggtatgtgcgggaactgtcatagttgccgttatcataatttccggatacccatacaatattacgtccccataagatcggctgggaatccgtctggatcgttacattcttgtataacttggataatattacgtttccggaagcatccataaggagataatgcagaatactctggtctgaggtttcctctgagaaaaggactgcgtactgattatttcctacagggataagttttggttctgtcagggttatttctgcacctgacggtgaatactgagtgagccagataaatctggaagccatactgttcttatctgtgattatcataaagatatttttgttaagattctcatatccggtctgtccattcacagcaaaaccatggggaacagacttgcctactgtgatcagattatttccggccagggaaaatccggttacctcgcatccggtataattatcacctgtagcacccataaaaggaaagagatttaccgcacgatcctgagcgatatatccgccggaatatgcggagaaggaagacaggatcagacctctgtaataagcatccccatgatccagaaaatatacatgagaaccgtcatttacaacaaactggttaaaggaatggctgcaataaggcatatctgaattaataagcgtcatatcctgagtgttgatgacaaaagtgatatcactctgatggtgtattccttccattccatacatttcccgtcctgtatggacgatcagggtagaaccgatctgggtcatgcgcagggaagcagcatcaaaaggaatgtagattccttcaaacatatttgtgtatccgccgccaatgtccgttgcaccaagcagtttccaggcacggctgtatttgaggatccggacagcagttatgctgttgtcttcattcagatttttctgtcctactgcaacataaaaattcccatcgggtgcagcgtagaaccctccccacaatggaagcggaagctttactgttgttacattggtaacattaagatcggaattgcagacagcatcatataaagtctgatctttccaggcaacaatgtgaagatttcctgtttcatctgtatagtaagaagtatattcaggacttgcccagttccagctgtaagatccgctgttgattcccataccctgaagctgggagagaacttttctcctaccaaaggaggattttgaggaataggtggaagtaccggatgttattccctgaccagcattttcaaccagcgtatctccctcctggacagaaggcatttccttttcatccgaaaagaaatcatcatctgtctgttccgaagtaaactcatcttcagtgtcattgaactctccattgttatcaagctcctcaggaacagaaattacatcttcgtttgccgcattatccgggtcagtaaaaatatctgtaccatatgcaggagcaacattcattagagccatagaagaagccagtaataaagctgacaatttctttttcatctttcaaatcctccttggaaataatggtggttttgtgttggagttgcattgtaccaatcagtggtctggtacatcgaaagaaatattcttatataatcaatatagcatacaacttctgcaacgtctatgacagattatgttgatttaatgtgtgaaattgccagccagaaactgctcagcggatataacgaaagattagtgtcttacctcgggagaccctactcatcctgctattatccaatcctgttactgaataatcatgcagcctaagggggggattttctcccctacccagttacatatatcagttcattataaaatgcttaaatttttgtcttgacaactgaaccactatagctgtcaactatataaaaaaatactggtaaacaaaaaaacatcagcaggagtttttgatccatctggtcaggggctctttatttatattgggataaaatataatatactactatatctaatatacttgttttaccacttccatttttgtcggtaaaaatcaaacgctttgtgtcgaaatctttatactgacatagatgttagaacaatgttataataaaatcagctgaaaagtgaatttaaggagggtataaaatgaaaagtcatgttaatattatggactctgatatagcatatgagaatgtaattgtttatcatggttctgatcatattttaaaagaaccaatttatcagggtggaaaaacagataatgattatggaaatggattttataccactgaatataaagaccgtgcaaaaagttgggctgttttaaatggtgatccggaatactcttttgttaaccggtatattttgaatacttctggtctgaaaataatggatctgaacgattatggtatcttagcctggatcgcagaggtcattgccaacaggggaacaagcctggagagtgctgaaatcacaggttcgcggattgtagaaatgtaccgtatttctacagcagattttgatattatcaaaggctatcgtgcagatgacagttatacacaggtcatagaagcttttttgctaaatcagatcaatattgaagaaataaagaaacttttctataaaggttctcttggtaatcagatatttttgaaatcacaaaaagcatttaaacagattgaatggaaagatgcatggcaggtatacaaagacgaatcagatgtaacagctgactttcacgctcgcagagaagtaaatcaatttctttctgcaagaaaccgtgcaattttgctggaaggattcgaagttccgggaattacggtgagaactgctatggggaaatttttaatttatcatcaggagggcgatttttatgaataatccggcatatgattcaggttacctgaacagtgcaaaactatctggaagatatttatttaaattgatagctcgaaattgttctgactgttttggtataatctataaatatatgaaaagtgattatcgtagatatatggatatggggaatcccctgtatttatgtaaaactccgaaacagattatgggaaatatgggaattactgtagatttaaatgcagaaataagtaatacttatgatgaatttattctggaatggatgtctgactgctatattactctgcaatggaagtaccggctctggtcttctgaaataattgacattgtaaaaccggaaaaattatataagcagtattatccactgcacgaaacatctcttaccaatgcggttacaaaaatatatgagatttatcatttgaaagacttatatatgcatcatagtgaactactcggcaactgagttaccagagcatctggattgctgtttttaatccatcaaaatccatataatttgtctggcataaatccctgacttctttttccgtaaagctaacatattctgccagaagccccggttccagcattgaaaattcacgaaagtctgtcaatgcagacggtgttccatatttttttattggcaggcttcctgtcatataagaacctgctaggaactgagatatctgtacccctttaaacagtgcacgaagtaaccggatatacgatttctgcaatgcctcatctgcagaagcttcgcggaacagagaatgtaaatgggaaaaacatatatagtgataagagcgtagccagaaagataaccttaaaatctcctactgtaaaaggtgattatagttatggcagtgtgtatggtccatatctggatactgcccatctggcgcaggtaagaagtgttgtacagagctttaaactgaattatatccgaaaaggaatgtcagattatgataaagtcctgactgcttttaattatctccgcagcaattgtagatatgcatacaggggatggcagtataattatgcaaatacagcctggggtgcactggtatatggagaggcacagtgttccggatatgcaagagccatgaaagcactctgtgatgcgagcggggtagactgccgttacgtccatgcaaatgccaaagccagtaacccaagccaccagtggaatcaggtaaaggttggtggtaaatggtacatactggatgctcagtcaaacggctttcttctcgggacaaatacctggataaaacaggccgggatgtcctgggatacaaaaggactaccaacctgtagtaaaacagattataagagataaagactttcttttcgtcttcggatgttatgttatttatataaaaaaatccagaatataagcccagaatcgttgaattttcagcattctgggcttattttaagtaccaaatttttctattgtcttattatgtatagctgccataggagacgtattctaagcagtaaggtttgttccgatagatgctgcaatctcttttaacttatcggcagaaaaaccagtatatttttcaatcttatcgagagattctttatctttgatcatcatttttgcaagagatagatttttcttttctacaccttgctcaatgccttgttcaacaagtgcttttcccagattacacatatcctgcacctcactttcaaattcttctgtcatggcgatgccaaaatctttctgaagacgttttttctttgtctcagaggatgtagaaagagagaagagtgtattcagcagatcaaggatctccagatcactctctttatctgcatcacctaaatttacgataacaacttccataaggtcataactgccaagagtttcataaggctttcccaatactgtatcctgtactgtatggtatctgaagattccatttctacgttttttcgccggatccgggcagatccaaatactgtagactttctgaagcttttcataatgttcaccagtaaaaatagttccatactgctcggaaatcattcttgcacaataataaaatcctcttgtaactaatggataccccggtgtgtcatttaactggatttccaaattgatgatcagctgtacgggttcttcggtgttcggaatatatgccttaaaacgaatatcataatacacagtctggtctttgatagcatttgcttcggaattaaggcagtctatttgttcgtttccatccagtaatttactgcggtcaggatggtcctgatgtactgcccgactggaaatttcgatattttctttcaggcagttatcacagataaaattgacactatattgggaaaattcttttgtacaggatttgaggatccaggcaatgactgccttataggttaatagtttcttggcacattcatcatatcttgcacgatctgcggcaaagtctatcatttgtgccagattcgtttgacgtattatggatgtcacctcctgtcacatattttgtacttatattttatcagagcagatatttatttaccagaaaaatttttcgacaatcgcaggataagttttgacaaagaaagaccccagtcaaaatgactggggttttctttttaggaatctgtattatttacccaaatggattatttaacagtagctgttttcaggttggaccatgggctgaagactttctttccgttctcgtcacgtttccaagcgtggcagtatgcgtagtaggttccctgctgtacatatttgaatgtagtagaagtctgaacctgattcttgtttacagatgtgtaatctttgtttgtaatgcagtcacgatctgtagagattacatagtcataacctgcagcaccatctgtatcaccggaaaggattacagttgctttattaccaacaactttaacattgctgatcataggtgttcctggtttttcattagcttcagaaccagctaatgtaactgtcttagaaccgatgtagtatttactatcttttgccggagtaactgttactgttccgtcagcattttctgtaacaacatatttttctgttggaactttaacatttccgttcattacaacaacagatacagaacctttagaattcttagcggctgtaatatcacagtcagcaagatcttttttatcaattccccagttaacagaagatgttgttcctgtatatccattgataccttcaacacttactgtatatttctttgttgtaggctctgtataagcacccacaccaactaatttgtagtccttaccttcttctaatgtaagagcatctctaccatatgatactttaacaactggttttactgccattccttcagcataagtaccattagaaacagttacgttctgatctgacagctgaactggagtaattgtaaatttcttataagtaatagcgtttactttctgaccattttcatcttcgaaaacctgatttgttgtatcgttgttgccagcatagttgcctttaccaactacagcgatatatgcttcatggctggcattacctgttacattgtggaagtatttaatttcaaaatcttttccttcttctaatttaacagttttatgtgtaatcggatcagtataagaatagttgaatgttgcgcttgcaaaagtatgagcttttccatcatagataaatgactgattagctacattaacttcttttccatttgcatcctttgaatctggataactaattgtaaattgaccaagatcaatatttacagtacctaatttagctgtaatctgtgtattgttattggaatcttttactgtaggacgaatctgatgtccggtatagctttgatcatttacatttacagttaaagaagacatatcagctggtgtaatcgtaaatgtagttgttgtagtagatgtattgtcatcatcaccttttccaacaattgttacagttgcagtacctacatttgtaccgtttgcaatagacttaatttcgtaatctacatctttttcgagctcttttgttccatcctttacaatcagttctggaataattgcttctcctgtgtaagtataagatgctttttctgtagaaacagtccaagcacttgcctgtggtttgctgattttagaataacggtatacagctgcaggctgtgtagtaatattatttccgcttgcatcaacaccccagaaatttttatttgtaattgtaatcttagtgcattatttacgtataatatttattatttcacaattatacaattacgttggcttttgatcggcggaattatatttgatgattatataaatcgttgtattctatatgaaacgaaaaaagaaatcgttgcatttcgattggaacgattttatactatatattacaaatcaatattgggtttcaaaggattgaaaatgtggaggaaaatgtatcatgagggaaagcagaacattggaatataaggaaaatctgtcatctaacacgtttctgaaaacgatcagtgcctatgctaattatggcgaaggaaagattatatttggaatcaatgatcaggggaacgtcatcggcataacagatccagtgaacggatgtctgaatctggagaataagatcaatgacagtctcagtcctgtgccggagttccgtctggagatacaggaaaatacgatcgtgctcactgtttatgaaggcaggtataagccttatctctataaaggtaaagcttataaaagaaatgattcttctacagttgaagtggatcgtctggaatataaccggttgatcctggagggctgtaatcagacttttgaggagatcacttcattcaatcagcagcttacttttgctaaattggaaacagaatttatccgggtgatgggcattgagaagatcaataaagatattttaaaaactcttgaactgtattctgatcagagtgggttcaataatgcagctgcacttcttgctgatgataatcagtttacgggaatagatatcatacgttttggtgataccatagatgagatcatggacagggaatcactggaaaatatttccatactttctcagttggaaaaaacacttcagatgttccgaaagtattatcagtatgaaaaaatagagggagccgaaaggaaatgtattgacaaaatcccggaaaaagccttcagggaagcaatagccaatgctctgatccatcgaatgtgggatatcccggcatctataaaagtcagtatgtatgcggacaggattgagatcagttctccgggagggcttcctgccgggatcagcgaagaggaatacctgaatggtcagatatccatactcagaaatcctattatcggaaatgtgttcttccggctgaaatatattgagaaatttggaaccggaatcatgaggatcaatcatgcttacaggaacgcactgataaaaccatcgtatcagtgtttttctaattctatcaaagtaattcttcctgttataagggaaaactatgacctgaacgaagccgaacagatactggtcaacatccttaagggaaaagaaaaaatgtcaagatcagaaattgagaaagcagcagaaatggaaaagagtaaagcagtacgtactctgaacagcctgattgaaaagaaaatcctgaaaaaaacaggtgcaggcaggggagtcagatacaccttgaaatagcagaaagcaatataaggataagattctgttagaatatatggtataggtttattaaaaagaaagactccgatcgcaatgaccggagccttctttttaggaatctgtattaattacccaaatggattatttaacagtagcctttttcaggtttgaccatgggctgaagactttctttccgtcttcggatgttctgttgaatgcatgcattccaactacccatgttccctttggtactttcttgaatgttgctgttactgtaccttctttgaggttcagtactttgtgatcgccatagtgatatggacgtgtctcaccgttttctttcttggaggatgttccaagtactacatcgtaaccagttgcatttgcagctgctttgtatgttactttgatagtagatccgcttactttaacgtttgtgataaccggagcatctggtgtgattgctgttacagagaatggataagcattggaccattcaccaaatactttcttaccgttctcatcacgtgtccaagcgtggcagtatgcatagtacataccctgatctacatatttgaatgtagtagaagtctgtacctgattcttactgatagatgtataatctttgtttgtgatgcaatcacggtctgtagaaattacataatcataacctgcagcgccgtcagcttcaccagaaaggataacagttgctttgttaccaacaactttaacattgctgattactggagcaccaacattttcagatttctttacagatactttctggcttcctgtatagctcttgctatcagctttagctgttacagtagcagttccatcaccattgtcttttacatcgtattctgttgctggaacgattacgctaccattaagtacagtagttgttaatttaccgtttgtttcggaaatttcaactgttgtattagcaatgtcttttttaacaatcttccatgttatatcaatagtatatgtgtttgtagtgtcatttacaactggattgctgaatactccagtccattcacctgtaccattgctcagtttatatccatttttaagctttaatgtagcttttaatactttatttgaagctgtaacatctacattgttagaaagtcctgtgaattcataatcagttccttctactaatgttttatcgccaaccttaattattacatttggtgtaacagctacaccaccagcatattctgtgtctgatacagtaatatttttgcgacctacagtaactccttcaattgcgaagtcctgagcttttgtataagttacatcgcttccttcaaattttgtagaaccagcatagtttccaatacctgtaacataaacatatgcttttggtccggtaatattattgaaatacttgatttcataatctttaccttcaacaagattcatagttctatatttagctacgcttggaacaaatttaatgtctttaaatgttttttctgttccgtcatatccaaatacataatttgttttggtaaagtcaatcttatcaccgttttcatcaaatgcgtagaatgtaccatttaaatagctggtagtaagtgctctaggaagaatcttaaatccaacttctttagtttcaccaacaaagttagtatttgtttttactggtgctaatgttactgttgcatcaccaacatttacatttactttagaagttgttgggtatgtaattgcaaaatcagaagcgctcagttcaacatcatttaatgtgattttaaaattagaagttgttggcttaatctgacttcctgtataggtaaatgcttctttttctgcgtcagtagtagcttttgcttcaactttaacatcactcagatttgctttgttaattgtaaatttagctgtctgagttccagaataatcaccttttcctacaacagttactgtagcttcaccagcatttttgttgttagagcaggactggatttcataatcaataccagatgccagttctacaccatcaactgttaattttacagtcggtgtaattgcttttccagtataagtataagatcctacaacttcaagttttgcattagtatcagcgatatctttgttagttacagttgttgttttggaagcagtaacttcagttgtaccagttgtatagtttttgtttttaatatctgtttctactaattttgtagtaattgttgcacctactgaaacaggagttgtgcttgaagtatatgttaatttatatgcatctgccggaacatcttttttctttcctgtagcgcctgctttaacagtaacttttccatccatgtagtcagatgcggtctgaagacttccattgtactgaactttttcaggaacagtaatatctgcagcttcgattactgcggcattaattgcaaatgtaccaattttaacacggccactatagtttccagtacctacaatgtaaacttctacgtcttttttggaaacagccttagcatttgtgttatcatttacatactctactttgtaatcacttgtagataagttaacatttgtagttccactaacaaatttaacatctttaatatctttagtgattgcctcaccagtgtatgtttcagctcctaaatcttcagcagaatttgcttgtttatctttagttgtgccaagtgtatatcttaatccatctactgtaagtttatttaatgttacagaaagatttacggttgtgtttccgataacgtttgtattatcaccatttacagaaacagataaagttgtcgcaccacttgctaaagttgctggagcaacagtaatagcagaagaaatataagatgttacctctgtgtcgccaatgtagaaatgaattgcattctttacagctgttgcattagatgcatcatcttttccaatactgtcagtaacaattttgaaatctgacatctgattagcaacaactttaactttatctgttgtaacttttattacattacctgtataattgcgatttgttttttcatctttatctaaggagtctgtagcaatgctcaatgtgctttcagtgccaacagcagttaatccacttccagtaactgtatatacagatgttggaagagtttctcctgttacagtgtctttaactgttacataatcagaagagattttagatctttctgcataagaaacagtatttttctttaatgttaattctaatttgtctggattcagagtacgtttgttaattataaaaggtgctttaatctgtcctgtatatcctgctttgtctacagtagcaacaacctgaagtgtttttccagcaggtgtagcatttacaagatcgtctccctcatatgtatacttaaagtcattatatgaaagacctgaaataccagcaattgtaaatccagcaatctgagtatcactaaatgccacctgtttaccagtataagctacagttgcgccaccaagatttaatgtcgcagatgaaacatctacactcttaatttcaatgccttcaattgtagttttaaatccagcattagcacccgttcctgtaatctctacagatacaatatgaccagcatcagtagatacaaaagtagctgatgttaatttactatttaaatcagcaacacttgtagcacttccagtataagttcctgaatgaccaacaacttctttgccatcaatacgaactttataatcaaagtttgcaacatcagtgctaccatctttaagatcaccagatacagccaaagcgcctgtccaatttgctaatgttaatttaggtgcagttgcagttgcaacatctgtcacgtcagtagtattttctacaaccggagcttctgtagcatcatcagaaaatgtttcagcagccggagcttcagtctcaacggcagcatcagtaccatcgctgaactcagcagcccataccggcacattagaagtagcaagcattgcaacaacaagtgacatacttaatgtcttttttgccatgcccttctttgtgtttttaatctttgtcatgattatagttcccctttccttaatataactatttctttttgggtaaagattcctagacataatctgtctgttatggttaataatagtgctttcaccactttttgtcaagggtaatgctcaagaattttacgatttttttaaatttcatacacttcaaaagcatttattttccttgatttttcatgctaaaaatctataatttgttacaaatgtggtgagttgttcgttctaatcacaagatgatgtatcaacccctgtatggtcaaatggcagagaaccctctataattctctgccattttctcattttataactgttgttctttttttattctttcaacctgctcaatcggcatctgtgtatctgcagcgatttcttccaatgtgcttttgcctctttttagcatacagattactattttttctttcgtctctgtttttatttcttctttcacttcttctttcacgtcttgccttatttcatttatcagcttatctgttttcaactctaatacttctccgcccatggctcggtcaactcccttctttgttttttctgaatctgagaaaatgtagtctgcaatttttatgattacttccacaaggtaacgatgcagtgcttcttttccgttttcaagcagactttcttccagtcttctggatattgtcacatattcatccagcaatttctgaagtttttctggatctttctctatatcttctctgcttttttcatatcttatcacataaaatggcaggaaaaagagtagtttcttctgaaagattacatcctgtgtatatctttctatgtaaatagccggcaactcatattttattaccctcccgtctggcatgataatatccattccgagagtatcttttctgccttttccacgtaaatataatacacaggaatgaggaaaatatatcttgtaccgtccattctcaatctgctttgtttccagactcacagcaaaatcatattcaatcattcggattaccatttctgcatctccggtactctgacattctatatgatagatcttatctgctatttttaaccgggaatctgtaatcttttctccgttctttgtctggtgttcgtttctctgctgctcaactgctatatctgcgggataatttgtgccaaatacctcgttgatcagcggcactacaagctctggcattttctccagcattgttctgaaaacattatcaaatatggtgttatttgccatctgatacacctttcctggctgttagttatcgttcgcttttgtattttgattatgttttcggacgtattcttatttccagatgcttcgcatctatgaaattttatcttttgtgcaaagtgtttttgttttcgatcaccctctttgcactctgttttgtattttctattgtaacagatgccttctcatttttccagtcaaatctctgtttttaagaactttttgttcctttatattatatgtctgtacacaaaatttcccgtacaaatgaattaatgtattatgtcactactgtagcaaaaagcccctgcaatacagtcctgataactgtactgccaggggctttatttttattcagaagcaattacttctataaatatagcgtattatttctttctgacaataaccttatccagatgccagatatcatctacatattcctggatagttctgtcggatgtgaacttgccgctgcatgctgtgttgaggagtgctttcttagcccagcctttttcatctctgtatgctgcttctacgcgtttctgtgcgtctgcataggaacggaagtctgcgaggatgaagtagcggtctgctctgtctgtgttctttgtgttgagaagtgaatcgtacaggtcacggaagagttctgtatcattggagaaggttccgttgatgagctgcatcagtacctgacggatttcttcgtctgtgttgtagatcacgtttggatcgtatccgccgttgttttcgtagttgattacttcgtcggagcttaaaccgaagatgaatgcgttttctgcgccaacttcttctacgatctctacgttagcaccgtccattgttccaagtgtaggagcaccgttgagcatgaacttcatgttacctgtaccggatgcttctttacttgctgtggagatctgctcggaaacgtctgctgctgcaaagatccactcagcgttggatactctgtagttttcgatgaatacaactttgatcttgccgttgatggaagcgtcgttgtttactacgtctgctacggagttgatgagtttgataatcttcttggctgttgcgtaacctgcggatgcttttgcaccgaagatgaatgttcttggatagaattccatttccggatgcatcttgatctggttgtacagatagataacatgcaggatgttcaggagctgacgtttgtactcgtgaagtctcttaacctgtacatcgaagatggagtgcgggtctacttctacgccattatgctcaaggatgtatttagccagacgctctttgttcttgaacttaatgttcatgaattcctggagtgctttttcatcatctgcgtaaactgcaagtttctttaactgcggaaggtctgtgatccagtccggtccaatatgctctgtgatccagtctgcaaggagtggatttgcgtggagcaggaaacgtctctgagtgataccgtttgtcttgttgttgaatttctcaggcatcatttcatagaagtcttttaattcctgattcttcaggatttctgtatgaagacgtgcaacaccgtttacagagtagcctgctgcgattgcaaggtgagccatcttaacctgtccgtcatagatgatagccatctttttgatcttctcataatttcccggatattttgcctggatctcaaggatgaaacgacgattgatctcttcgatgatctggtatacacgcggaagcagtctggagaagagctcgatcggccatttctcaagtgcttcggacatgatagtatggtttgtgtaagcaacagattttcttgttacttcccatgcttcatcccatccaagtccttcttcgtccatgaggatacgcattaactctgctactgctacagtcggatgtgtatcgttcatctggaaggttactttttcatataatttatggatatcgtcatgtttctttttatatttggcaattgctgcctggaggcttgcagatacaaagaagtactgctgtttcagtctcagctctttacctgcataatgattgtcattcggataaagaacttctacgatattacgggcaaggttctcctgctctactgctttcttgtaatcacctttgtcaaaggaatcaagctcgaagtctacgatcggctctgcatcccagatacgaagtgtgtttactacatcattgtcatatcctgtgattggcatatcataaggaatggcttttacagcctgatatccttcgtggataaatttgtttccgcccttttcaggatcgtactctactcttacatatccaccaaagtgtacttccttggcatattccggacgacgcagttcgaatgggtagccgttctttaaccagttatccggtacctcgatctgataaccgttctggattttctgtttgaacattccgtagtggtaacggattccgcagccatatgctgcgtaatttaaagttgcgagagaatcaaggaagcatgcagccagtcttcccagaccaccgtttccaagcgccggatccggttcctgatcttcgatacagttaaggtcaaatcccagctcttcgagagcttcttttacttcaccgtaagcgcaaaggttgatcaggttgtttccgagagcacgtcccatcaggaattccatggacatatagtatacgatcttcggatcctgttcgtcgtaagctttctgtgttgcaagccagttatcaatgataacgtcttttacagagtagcttactgcctggaaaatctgctcctgtgtagcttcttcaattgtttttcgatagaggaattttacgttgtcttttacgcttttcttgaatgcctctttcttgaacatttcgtttgtcatttcatacctcccgtaatggtttcactgttcactttattctcagcaatacaccttgcggatattgccggtgaacctcttcattccgtcaactcttctgttttctcatatcagagaaattgggggcaaagaatctctgcctccaatttcctctctgaaatcagactgtcaaagataatgatactcttttttcgacagtctgtcatgtgtataattgccgaattttataacatttttttgttatcgttactgttcacagcaacacgcttcgcgatgcacagaatttatgctaatcgcataaattcgcgcggtatgtctcgggttttctgtgaaatacctgtaacttatcattaccttgtcagtaattgaccgaatgttgtctattgcagtttcttaacacccatagttactgcttctttgttgatgttccactctttcacataaccatcggtctcgccaagtaccatttcgtctgcaagtacttctgacttgatctcatcttcgtgtgctttcatgacatcctgaatcttgtcgtttccgtgagcgtatactacgatcttgtccataacttcgaagccggcttcctttctcatggtctggatcttgctgatgatctcacgtacaaatccctcttcaatcagttcaggtgtcaggtttgtatccaggactacggatgtttcaccgtcagattcagatacataaccctctgtctgtgctgtttcaataagaaggtcttcttctgtaagctctacatcgtttccgttgatatccagtttcaggacaccgttggttctcagttcgttcattgctgctgttccattgatgtctgtgagagcctgtctgattcctccaaggagtttaccgtatttcggtcctactgtacgaagctgtggtttgaagctgtaggagataaaggattctacatcatctgcgaattttacttctttgacattcagttcgtctgcgatgatgtcagtgtagaattcactcattttcttctcagcttttacatacatggttccgatcggctgacggttcttgatgtttgctgtatttctgcaggcacgtcccagaactacgatctccagaagttctttcatgtctgcttccagatctttgtcgatccatgcttcgtttacagttgggaagtcgcagagatggatactctctggagcatctttatccacgcttcttaccaggttctggtagatgtcttctgtcatgaacgggatcatcggagctgctgtcttggcgatggttaccagtgcatggtacagagtcatgtaagcattgatcttatcctgctccattccctttgcccagaaacgttcacggcttcttcttacataccagttactcatctcatctacaaattcctggagtgctcttgctgcttccgggatcttgtagtttgccagatcattgtctacagcctgaactgttgtgtttaatctgctgaggagccatttgtccataacaggaagctggtcatagttcagttcatatttggtcgggtcgaagttgtcaatgtctgcatataatacgaagaatgcgtaagtattccacagtgtgctcatgaatttacgctgtccctctactactgccttgccgtggaaacggttcggaagccatggagcactgttgatgtagaagtaccatctgatggcatctgcgccgtatttgttcagtgcatcgaatggatcaactgcatttcctttggacttactcatcttctgtccgttctcatcctggacatgtcccagaacgattacgttcttgtatggtgctttattgaagagcagtgtggattctgcaaggagtgagtagaaccatccacgggtctggtctactgcctcagagataaagtttgcagggaactgctgctcaaataattctttgttttcaaatggataatgatgctgtgcgaaaggcattgctcctgagtcgaaccagcagtcaataacctccggtacacgatgcatttctccaccgcactccggacacttcagtgtgatctcatcgatgtatgggcggtgaagctctactgtcttggctctctcatcaccactcatctcgaataactcctgacggcttccgatggaatgcatatgtccgcattcacactgccagatgttcagcggagttccccagtaacggttacggctgataccccagtcctgaacgttttcaagccagtcgccgaaacgtcctttaccgatgctctcagggatccagttgattgtattgttatttctgatcaggtcatccttaactgctgtcatcttgatgaaccaggattctcttgcatagtagatcagtggtgtgtcacatctccagcagtgtggataatcatgctcgaattttggagcatcgaagagcttgccttctttgtccagatctgtgaggaccataggatctgctttctttacgaaaacgcctgcgtatggtgtctcttttgtcaggttaccctgtccgtctacgaactgtacgaatggcagttcatagttacgtccgattctgctgtcgtcttcaccgaatgcaggtgcgatgtgaacgatacctgtaccatcactcatagtaacgtagttatcacaggttacgaaatgagctttctttttctgttttgctgctgcctctcctgcacatgcgaaaagcggctcgtatgctttgtattccaggtctgttcctttgtaggtttccagaacttcatatgctttctcgccttcttcttttgcaagcttgccaaggactttgtcaaggagtgcttctgccatataataggtatatccgtctgctgcctttactttgcagtaagtctcatccgggtttacgcagagtgcaacgttggacggaagtgtccatggtgttgttgtccatgcaaggaagtatgcatcttcaccaacaaccttgaatcttacaactgcggagcgctcttttacagttttgtatccctgggatacttcctgtgcggaaagaggggtaccgcatcttggacagtaaggaacgatcttgaagcctttatacagaagcttcttgttccagatttcttttaatgcccaccattcggattcaatataatcgtcatagtaagttacgtatggatgttccatatcagcccagaaaccaacagtagaggagaaatcctcccacattcctttgtatttccagacgctttccttacactgtttgatgaatggctccataccgtattcttcgatctgctctttgccatccagaccaagtttcttctctacttccagctctaccggaagtccgtgggtatcccatcctgctttacgcggaaccatgtagcccttcattgtacggtatctcggaatcatatccttgattacacgggtaagtacatggccgatgtgcggtttgccgtttgcagtgggcggtccatcatagaatgtataggtttctccttcttttctgttctccatacttttctcaaagatatggttttctttccagaattcttctacttttttctcacggtctacaaagtttaagttcgtatcaactttctggtacacagtaatttacctcctgtttaaattatttgtatcagacacctgaaaatatgcaggacgtttatatacactgaaaaatatttccggtgtcctttaagaacgaaaataagcccataaaaaaatcgcccttttgtaaaaggacgaaggtttattgacgttcgctataccacctgttacattgtacgggcatcctctgccgatacatgaatcttttaacggggatttccgtcagctcttacctgtctgtacacccttcagagctgcaactccggagtgatcttcactgcatttactcaccaccgggctcacaccctccccggttcgctgtctgctttcccctgcaattactctctccatcaacgtttttgtggacatatcatttatttaactatgcggattcattataaggtcacaaaattcactgtgtcaagtatttttttgaatattagggtaatcctgttactgtttaataacactggttactgtcaaactcccgaacagtaacacactgttaacatactatcatataaattttacacaggcattgtaattaatgatataataaggtagaatattttgtccgaacgtcatttaagacgatgtactaggatatggaaagcaactactatgtatatttaatgaagggtaatttcaaatgtttaaaacaaaatttcataaattaatgaaacgtttcctcaccggaatgctttgtgcagggattctgacctcccagcctgcagtcacttacgctgccgagacctctgccactcctgaagccggtcattcagaaacctattcacaggcctcagatatcgattctgtcaaaggatggcccacaggtcctaatatcgagggacagtccgcagtgctgatggatgcagtcactgatactattctttattccaagaatgccaaggataagctatatcccgccagtatcactaagatcatgaccgctcttctggcctgtgaatatctgaatatggacgatacgatcaccatgtcgcaggaagcggcttatgggattgaggccggaagctccagcatttacgcagaaacaggagaggttttcacagtagagcaggccctgatggctctgatgctggaatccgccaatgagatggctcttgctctggcagaaaaaacaagcggttctgtaaagaagtttgttgaactgatgaaccagagggcagctcagcttggctgtaagaacacccattttaataatccaaatggccttccggatgagacgcattataccaccgcaggtgatatgatgaagattgcaaaggcagcctggtataatcccagattccgtaaatttgtgaccacacaggtttatgagattcctccgactaataagcagtctgaaacccgttatcttctcaatcaccataagatgatgcccggacagtcttatgcatacgatggggttctgggaggaaagaccggatacaccgatgcagcgggaagtacgcttgtcacctatgccaagagaggaaattccattctcattgcagttgtgctgaattctacaaacggtgcttttcctgacacaacttctctgctgaattacggcttcgacaattttgaaaaagtagacttgaatatagataccgatccggtaccggcagtatttctcccatgcgaaaagcacctgttaaaggactggaataatctgtgttccttctattatatgaggcatgtgtacgtaactgtccccacaggaaccgatgtgagccagcttgtaaagaagcagaaacttctgaacaattctgtcggtccaaagcgaattaaaagtaaatattatttagacggccatatggtcggatatggaatgcaatatgaaaaggaaatcctttcagatttccttctcaacgcttctttttagttttcgcctgaggcggaggacttcttttctttcacgaagttcctctgcttcttctgtatctgtgaaacgcaatgtcttcacagcgaaatatttctcatcttctgtttttcggatgcggatcttgcctcttatcagcccatgttcttcacaattggatatgctgtaataaacctttggattattcataaaccatcggagtttgcgctttgcaggcagatgacagaccggacatctggtgctggtcacctcgcggtctttcatgattcgctctcttgtggcaaattctctggatacatatttgtcatgatccggataggaaatatgtatctcgtcttttttcttctttggattctggtaaacatccagtgacggatgattgatgatgattatgttatttattttctccaggactttcgctgtataccacgcatctgcaagcgcccggtgaaatcccctggatttctctattttcagctcatcgatcgcatgctccaatgcacacctgtgtgtaccgtcatcataactgatactgtatagtttctgcacatcataataggtcacaggtccgggaagcagatccagcaggccatagaacttcatatttctctgaagttccatcacgtcctgatttccccaggtaaaaaagtaccagtcttctccgcaccagtcaataaattccctgactgcctgctcaaagggcactcctttcattagatctttataatctacatgaattacctcatggatgctgtcatgaatccatttatagacctgtggtttgatcagtcggtgaaaatgatccgttatttcttttttgctgtttacttttacagccccaatctcgataatctcaaatggaagcctgtcgttacgtgttttctttcccgaaggattctgattccattccaggtcaaagacaatatagttcattcatccggtcctttttgtttattactttttcgcatttattttccactgctgacaaacatattatttcacaatcttcagttcatactgtctggttcccagaccaatcttctctgcctgatccagtgttgcctgccattcaatgttcgggttggaatctttgaaatggtcgtggtggcaatgccagtcaggttttgccagatgttctccaagctggctgttctcgatcggagttgctttcagacaggcatctgcgcaggcctggtccagagcaaccgggtcaaagcttgcaaacattccgatatcaggaaggattggtgcatcattttcgcaatggcagtcacagttcgggctgatatcctgaacaagtgctacatggaaatgcggacggccatgacagactgcctgtgcatattctgccatcttacggtcaagaagttcatttgcactgctgtttggattgtatactgcatcaaaaccgcaggctccgatacaacggccgcagcctttacatttatcataatcaatgactgcttttttattcggatatgtaatcgcatcacttccgcactcttttgcgcagcgacggcatccgcggcagagttcttcatttactgcaggttttccgctggcatgctgtttcatcttacctgcgcggcttccgcatcccattccgatattcttcagtgcaccgccgaagccggttgcttcatgtcctttaaagtggcttaagctgataaaaatatctgcatccatgattgcatgtccgatcagtgcagtctgacaatattcaccgttaactaccggtacttctacttcgtctgtaccgcgtaagccatcaccgatgatgatctggcatcctgttgaaatgctgttaaatccattgagatttgcgcactccagatgctccagtgcattcttgcggcttcccggataaagagtgttgcagtctgtgaggaacggaagtcctccctgctctttacagagatcagctactgtttttgcgtaattcgggcgcaggaaagccagattgccaagttctccgaaatgcattttaatagccacgaattttccatccatatcaatgtctttgattccggctgtaacgcagagtttcttcaatttatcaagctggctggtgccaaccggacatctgaaatcagtaaaataaacggttgatttttccatcatttttcctcctgtttttattaatcaaaatttgattttcttttttattttatcacaagatgcaggttcttttcgagatatttttttgcttacatctgttcgtaaaattttgtcacctttttgtattctgcaggcaaagtgatctgctctaccacaacatctccatcttctgcattgtggtaacggtaaatgtaaacgccttcctggatctcatctccttcgatcagagaaactgccagatatccctgtccttcaaattcaaaggtatccatgatcgcaaaatcccgttctgttccgtcagataccggaatgctgattacttcatattcttccatagtatgttttcctttcattcataagcagtcttattcttattttcgctgttttttattgtagcaaagagtgttaattatatcaatcctatttaaccgaatcaagtaagtcgttactgttcacaataacagtaaggcccctgcgggttacaaaaagaaagactgcacctccaatgagcacagcctttccggtttagtatattttattcagttctgcttacaattgcttatgccataatcggttttaatgattctgcaagcttctctttctcagcttctgcctcttccaggttcttgccgagagttgtgtaatagatcttgatctttggttctgttccggatggacggacaactactgtctcgccgttatccagcttgtagatcagtacgtttgctgcaggaagtcctgtttcttccggtttctggtaatctgttacttttacaattgcatgacctgcgatctctgtgagaggtttgtcacgaagtccctgcatcagagctgacatcttatccattccgcttaatcccggaaattcaaagctgtctactttgttcaggtaacgtccgtactgtgcatagatctcttccattctctgtttcagggaacttccgatgcttctgtaatatgcagccatttcacagatcagcatagatccgataacagcatccttgtcacgtacatatggtcctgcaaggtatccgtagctctcttcaaatccgaagataaatctgtctacttcatctgctgcttcaagctgtgcgatctgatcgccgatccacttgaatcctgtaagtacgcttctgagttctactccatagtgctctgccactgcatctgcaagtggtgtggaaacaatggatttcactgctacggggttctttggcattgtgcctttttcaatgcggcctgcacagatatagtcaagaaggagtacacctacctcgttacctgttaccagttcataggaaccatccgggcatttcattgcaataccaacacggtctgcatccgggtcagttgcaagcattaagtctgcacctgtttcttttgcgaggtttaatccaagctccagagctgcaaagatttccgggttcggatagctgcaggttgtgaagtatccgttcggatattcctgttccggaacgattgtgatatctgtgattccgatatcttttaatacctgagttacaggtacaagacctgatccgtttaacgggctgtaaaccagtttcagccctgctgtcttgcagagacccggacgaacctggcgggattcaatggcttcatagagagcctgcttgcagtcatctcctacgaaacggatttttccctgttctacgccctctgcgaaggacatatatttcgcgcctgtaagtacgtctgttttctggatctcttcatatacaatggcagctgcatcgtctgtcatctggcatccgtcaggaccatatgctttgtatccgttgtacttagccgggttgtgggatgctgttaccataatacctgcattgcattcatagtaacgtgttgcaaaggaaagtgccggtacaggcatcagtgcgtcataaattctgacattgatatcatttgccgccagtacgcctgctgctgtttttgcaaatacatcactcttaagacggctgtcatagctgatggctactgtctgattaccgccctgtgtttttacccagttcgcaagtccctgtgttgcctggcgaactacataaatattcatacggttggttccggctccgagaactccgcgaagtccggctgttccgaatttcagcgctactgcgaaacgatctttgatctcttcatcatttccttcgattttggataattccggattaagatccgcatcctgcagatctgctgccaaccagcgtttgtattcttcctgatacattttgaccactcctgccttgttttttagattttttaagatattttcataatatcataaatcagataaatcagcaacaatgcagcgagatttcggtcaaattttaaaagttactttcttttctgtttgtctgttctctgcagacatttcctatattggtcaggcagagcactgtggcaaccaggaaaattcccgggatcagaatgatccaccaggatcctgtcattaatgccttatctgacagagacagcatacttccccatgtgataatctctatcggaagtccaatacccataaaacttaaagtagcttcagagatcattgcagttcttacattcatgactaccataaacataatggatgagaaaaagttcggcaccagatgcttccacaaaatacggaaaaatcctgctcccatacatcttgcagcgatgatatactcactgtttcgtatctgccgtacctctgtgcgtactactttcgcaatactggtccagctggtcacaccgatcacaaaggacagactcaggatatttgcatctcccataatagcctgcagcaaaatgatcagaagcagagttggtatacttaagaatatttctgtaaatctcatgatcagttcatcaagccaggcaggtgccactccactgaaggcaccgactaccactgcaataaaagtagaaataactgtggctaatccaccgatcaagatcgagattcttcctccataccaaatcatggaaaaaatatcccttcccatagtatctgttccaaaaaggaactccctgtcaggagctttattatagtttaacagatccatataagcaggatcctttgtcatgatcagttccgcacacaggcagcccagtacgataagaatcaggattgctgctgaaacaacgggttttccctgataccactttttctttgatttgggaattacggtttctgtctttctgtttcctgccagttcaaataaatgattggtcatccttctactacctccgatttctcggttattacttcatccttcatacggggatctatctgttcattaatagtctgactgacgatattacagaaaataaccaggattcctgacatcatacaaagcagcatcagcagattgtaatcatgatatctggcactctcataggacagagctccgattccgggataagagaatacactttctaccacataggttcctccaagtacatgggggactgcaatggccataatactcagataagcaggcattacatttcggacacaatgtctgaacataagctttttcttatccaggccttttgcctttgccaaaagtacataatctgcgcgaacctcttcaaggatcttatttcggatcatgtaagcataataccataaatgctccatgaccacgatggtcagaggcatgatcagatgcagcactctgtcaccgatatctcctgcatttcctgtactgtaagctccactgcttggcaggatcttaagatttacggaaaaaacaaggatcaggaccagagccatccagaactcaggaatacaactggatatggttcccagcttacacaggatccggtctgccagccggttttcgtaccaggcacacaggattcccaaaagcaaggctccggcaaacataatgataaatccgattcctccaagtacaagtgtattgccaatacggccgccgatcacttctaccacatcctgtttatatttaaatgaaattccaaattctccatgaaaggcattttttacccacttcacatactgcacagaaattggttcgttcagccccagtttctccatagcccattcacgttcttttggactcatcttctctgtgcggtcgccataataggagatcagcggatctcccggtgcaagacgggctacataaaatacagctacagacaatataaatactgagatcaggaatatcaggcattttttaccatagtagactaactttttttgtctcataatatactgcccccctttccttcagccggaagcattgcaaaatgtccgggtgacacttctgtccacacgctgttttccattccttcgccatcatagtactgcagaactctttttctctccctgatcgggtcaggaacaggaattgcagacagcaatgtttttgtataaagatgcaccggattggaatacaattcttctgatggcgccagttctaccagttttccatgatacataactcccacacggtcacagagatactcaaccatagccaggtcatgagctataaacagaaatgtaaatccatgctcctcctgcagatgacggaacagattgacgatctgggcctgtatggacacatccagggaagctatcggttcatcagccaccagaaattccggttccatgcacagagatctggctatggccactcgctgcctctgtccccctgataattcagacggataacggtccagaaaactgttctcaagtcctacatattccatctgaaaagcagcttcctttacaaagcttcctctcggaggtgtaatatgctggattctcattggttccgtaataatatctgacaccttcattttctggttcaggctggatgctgaatcctgaaatatcatctggcggcaggtctgcagcatttttttatgctttttgaattcctttttgtcgcagatatttacatctttataccagatttctccctgagccggctgatatatattcatcagacatctggcaactgtggactttcctgaaccggattcccctaccagaccaaagatctcacctttatggatctgaaatgagacatcatctacagcctttaccttgatcttttttgtcagatgaaactgctgagtcagatgcctgacatccaataaaacttctttactcatgcgctgttcctcccacaggtgatttgatctgcggtgctcttggatccaacagccaggttgccgcataatgagtatctgttatcttaaacataggcggcatttcttcataatcaatattcagggcatattcatttcgacatgcaaaagcatcacctttcggcggatctatcaaagtaggaggcatgccggggatggtgtacaggctttcttttccatttgcaaatgcaggcagtgatctcatcagtccccatgtgtatggatgtctgggatcataatacacttcctctgctgtaccgatctctacgatcttgcctgcatacatgactgctaccctgtctgccacacgtgcaaccactcccagatcatgggataccagtatggtagctgttcccagcttcctctgtatttcccggagaagatccagaatctgtgcctgtatagtcacatccagtgcagtagttggttcatctgcaaataaaatatccggatctgctgccagagcgatggccatgacacatctctgacgcattcccccggaaaattgccatggatactgatgatatcgttcctttggatgggagatacctaccagttccataagttccagaaccttcttatttacctgttccttcgtgtagttcttattgtggatcaccactgcttccccaatctgttttccaattttaatagttggattcagggatgtcataggatcctgaaagatcatagaaaaaactcttccacgcagtttctgcatctccctttccctgtaacaggtgatatcctgtccgtttacacagatgcttccctcttttatttttgcgcttggtggcaaaagcttcatgatacttttgcaaagcacactcttcccgcatccggattctccaactatagccagcacctctcccttttttaatgaaaaagacacatctcttactgcctggacttctccggcaggaccgttaatgctgactgaaagatttttaacctctaataaatgttccattttcaatcctttttccgctcgtgtaaaaagggggcacctttagtgcccccgtcacaacctttatcttttttatgatgttagagtcaaaggtcttatggtgcaagcatgaatggctttttgaccttttgaccctgatatcattttattattcaatagtccagtctgctacattccagaagattccaactccatgatgtcccataattgtatcaggatcgattcctttaatattgctgtcagcaacatagttggcatcaatatagcagatcattgcataagccggatcctctgccagagctttctggaaattagcataggcttctgcacgaacttccggatcagctgactgtcttgcttctgtcagatacttgtcaacgtctgcattagaatagccggagtagtttgctcccttatctgttccgaatactttgtatgtatggtcgtcagcgtcaaatgggcttccccatccgatcaggaatgccatctgtcctgcccagtctgtctgtgcagggatctctactgatacatccatgccgatctctttcagttcctgtgctgcgatctgagccatatcaatacgtacctgatctcctgcacttacgctgattacaaatcccactttttcgccgtcacgataatagaatccgtcatcacccatctcgcatcctgcagcttccagaatttcttttgctttttcaggattgtaatcataatgctctacatcttcataattgtaaatatttctctgaagaggtccataagccggcattccctgtccaaggataactgcgtcgatgatcgcctgacggtcaagcccatagcatactgccgggatcagatcacggtttttctgccagtattcatttccaaagttaaacatgattccacgatagtcagaagtcttcatatcgtagcatgtatatgcctcatcatctgcaaaagcagctgcatcctttggtgttaataatgccagatcaagttctccggattttaactgaagtgctttcgcattgtcatccggtacgatcttgaatacaactttgtcaatggaaggctcacccttaaaatagtcttcgttcttaaccagtgtgatcgcctgtccctcatcccaggattcgatcttgtatggacctgttcctaccggattacggaagaaatcagaggtctgcatatcttctccctcaagcagatgcttaggaagaactgccattgtcatatagtcaaggaatgcaacgtttttgtcctcaagcttgaacgcaaccgtatgatcatcaatcacattgatctcttctacgtcctcgtagttgggtgcattctcagaaccattttccggatccatgatcgcttcaataataaatttaacatcctctgctgtcacaggttcgccgtcctgccacttggcatcttctgccatatggaatgtataagtattggtttcatcatcaaaatcccagctctctgccagtcccggaactacctgattatctccgtcatgtgcagttaaaccgttgaagatcagaatattgatctctccatgttcatccatagcaggattgatcctggtataatctccgcttccgtataccagtgttgtttcttcctctgccagtacagtcactgttgctccggcactgaccagtgatacagtcagaagcactccggccattatcaataaaccctttttcatttcatgttccctcgctttttctttattggtaactggcttttatgatatcagacaattctgacatcagtaagccctgcggggggatattgacatattcctttttgtgccttatatatgccatatatggcatacctgcagcagtatcattactctccatcgcagtgcgatcctgcccggagtgttatttatgttataggaacattacagagtaatttcctataatataaataacactccgcctttagtatttcactaaaagcgaagtgtcctgatattaatataattttgcaccagccggaatatggtcatctaccatcagaagatgaagtttttcttcgccctcttcttcatggattgcactaagtaacattccacaagattcaattcccatcattgctctaggtggcagatttgtgatagctataagtgtcttacctaccagttcttctggttcgtagaatgcgtgaataccgcttaaaatggtacgttctacgcctgttccatcatccagagtaaactgtaaaagtttctttgacttcggcactgcgacacactcttttacctttactgcacggaaatcagatttgctgaaagtctcaaaatctacctcatctttgaacaatggttcgatttctacctttgaaaaatcaatcttctcaactggcttttctgaaaccgttttagcctgcgcaacgttgtttgcttcgttcttagcagcgccctgggacttcattgtcgggaacagcagtacgtcacggattgcctggctgtctgtaagcagcataaccagacggtcgattccgtatccgataccacctgtaggcggcataccgatctccagtgcattcaggaagtcttcatctgtgtggtttgcttcctcatctcctgcgtcagcaagagcatcctgtgctttgaaacgctctctctggtcaatcgggtcattgagctcggaatatgcgttacacatttcccatgtattaatgaacagctcgaaacgctctaccttattcggatcagaaggtttcttctttgtcagcggagaaatctcgatcggatgatccatgataaaggttggctggatcagttctttttcacagtattcctcgaagaacaggttgatgatatcacccttcttatgacgttcttcatattcaatatgatgctcatctgcaagcttcttagctgcttcatcatctgcaacttcatcaaagtcaattcctgcatatttcttgatcgcatcattcatggtcagacgttcaaaaggtttgctgaggtcgatctcgataccattgtaggaaatcttcgcagaaccacaaaccttctctgccagataacggaacatagactcagtcagttccatcatgccttcataatctgtatatgcctgataaagctccatcagagtaaactccggattatgacgggtatctacaccttcattacggaatacacgtccgatctcataaactctctcaagaccaccaacgatcagtctcttcagataaagctcaagagaaatacgaagcttaacatcctcgttcagtgcattataatgagtttcaaacggtcttgctgcagcaccgcctgcatttgcaaccagcatcggagtttccacttccatgaagttacggtctgcaaggaagttacggatttctttcagaatctgggaacgtttgataaatacgttcttgctgtcctgattcatgatgaggtctacatatctctgacgataacgcatatctgtatctgtcagtccatggaatttctcaggaagaatctgtaagctcttggaaagaagagtcatgctttctgcatggatagaaatctcacctgttcttgttctgaatgcaaaaccttccagtccgaagatatcaccgatatcggatttcttaaaatctgcataagaatctgctccgatcgcatctcttgctacatatacctgaatatttccctgtaaatcctggatattgcagaaagaagccttacccataactctcttgaacatcatacggcctgcgatcgctacgtggatcgggcttgcgtccatgatttctcttctctcttcgtaatctttcttaacagcttcctttgcctgttcttcatcaagacctgttacatctacttctgcacgatctttgagaagttctgcctcatgtgcttcataaagactcttcacttccattgagtgatgagtctggttaaactttgtgatctgaaatgggtcttttccattagcctgaagatctgccagtttatcgcgacgtaccttcagtaactggtttaaatcctgttcctgcttctgctgtgccaccttggttcctccttatatacttgtataattattatttgttcataactgttcagtaccttcacagttacgagccaaaatgcattaaaaatcacctgcggtgatggcattttggcttgtatgtctcgggattttggtacttacgtgccaaaacacctcgcgggatagtagactactgaatagttacatttattctacatttccatgtgatatcagatgtaacagaagattccattcaacagaatcctgtattttcaaatatcaatttatcagatatacagacaaaaataagaaataacaaacttcttattgtcttcttattatctgcttatatagtcagagaaaggtgcgcgttatgcctttgcatgataaatctctacgcgcacctcagtcatctgtctcttatacgtttctctggatctccagaactttgtatttcatgattcctgccggcatctctacttctactacatcgcctgtatgcgcaccgataagtgcttttcctacgggagattcgttggagattttgccttcaaggctgttagcctctgtggaacctacgatcttcagctcgatgtcttcttcgaattcaaaatcgtgtactttaaccttacatccaacgctgatcttgtccagatctacttcgtcctctacaacaacttcagcattctttaagatcttctcgatttcttcgatacgtgcttcaatgtctctctgttcgtctttcgctgcatcgtattccgcattctcagataagtcgccctgttctctggcttccttaattttctctgctacttcttttctctttactacctttaaatcatgcagctcttcttctaattttttaagtcctgcataagttagtaagtttttcttttcttccataataaccttactccctttcaacatccggtatagtcttctgcgtttcttttcgccccggatcactacatggatttatgtgcttcctgatacatcatacctgaaaaagggcagacttattctaggatattcacaatttctgtattatacaaaaaagcacccagattgtcaagcattccgagcgcctttgctattgtttatatttttcatttcacatggttttaacttttatgctaatcttgataaaagcgcctccagagcttcataactttctatggtgtttgactctcttctgagccctgcgctgtgacgcatgcctgcagtataccaggcaacgtgtttacgcatctcacggattcctacgaattccccttttaattcaatctgttttctggcatgacgcaggatcatttcacgtatttcctctacagacgggcgttccaacagttctcctgtccggaaataatggttcagttcgcggaacaaccagggatttccccttactgcacgtcccaccataacagcatcacatccggtctgttttaccagtgcttctgctttcagtggagaatctacatctccgtttccaattacaggaatggtaatcgcttcttttaccctgcggatcgtatcccagtctgcagtgccggaatagtactgctgtctggtgcgcccatgcactgcaagtgctgctgctcccgcctcctcaatacgtttcgcgatttcaacaatatctaccggttcattctcaaatccgattcgcaccttgacagtcaacggtttactgattgcagatgatacttttccaacgatctcttcaatcagattcgggttcttcaacaatgcagatccctcgccgttattgacaaccttcggcacagggcatcccatattgatgtccaggatatcgaaatctctgtcctcaatggatttcgcaacctctgccataagatccggttcactgccaaaaagctgcatggaaaccgggtgctcacatgaatcaatctccatcagggcaatggtgttcttattatgaaaagaaatcgcttttgcactgatcatttccatacagatcagtccggccccctgctctttacagagcgttcgaaatggcaggtctgtgacacctgccattggtgcaagaacaaacggattatcaatctgtacgtttcctattttccactgcatctccatgaatggttctcttgcccgtaccggctcattccttgtctgcatggattcagtcctcactgcccgatgttttcttcagttcttcttccgggatgtctccgagaaagaatactttataatacatttccagagattccagaagttctttcttgtcctgctgaagctgtttgatcttcagtccgcttccgatctcatcgtagcgggcatctgcttccagagcttctgttttaaactgaagtctgccgttttcgtcaaattccagagtcaggattcctcctacatcctctgtgtaaagaacacacatgatctgaagttctttcttcacatgatccggaagtgcattgaaatcctgattaaaataaaatttcttctcataggcacttgcgccgcagagagtaatgttgtcctgatacataaattactgtttccctctttcgaaattattcagaatctttatacatagctgtaaagtccacgcaccgaaacctctcctgcgctgactttcacaacttctttattctgcctttccacaagcagttcacctttttcatcaatccccctgcagattccttcgaaacttctgtcaccatcgatcactctgaccggctggttcaggtttgcaaggattctgtggtaatcatccagcagatgagtaaaatcacaggtctggataaatttctcatagttgatctcgaaatatttcatcaccagtgcaatcacctgatttctgtcatattcatgaccgccctccagaatcagtgaagtcgctttgtcctgcatttcttccggaaattctttcaggtttacattgattcctactccgatgagaacataattgatcttcacaccatttgttcccatctcggtcaggataccacagattttcttcttagagatcacaatatcattgggccatttaatacttacgttaaaccccagttcctctgctgcctgtgccactgccattcccataaccagtgtcagcatagatgcatactgcggtgaaaattccggacgtaagagcagtgtcatcataatagagctgccctccggcgcttcccatcttctgtcaaaacgccctcttcccgcagactgaaattccgcaactgccagagttccatgctctgcaccatcttttgccagacgcttgatccatgaattggtagaatctgtttcttttgcaaaatggacggttttgcccgcccattttgtgtctatcgcctgtgaaattgtttcttcattatacagatgtgccattatttgttctccggctctcctaatgttgctaccataacagctttgatggtatgcatacggttctctgcctcatcaaatactttggactgctcagattcaaatacttcgtctgttacttccatgtctgtcagattgaatctctcgcccatttccttgccgatctttgtcttaaggtcatggaatgcaggcagacagtgaaggaagattgctttctctcctgcgttcttcataacgtcctttgttactttataaggtgtcagatcatggattctctctgtccatacctcatccggctcacccatagatacccatacgtctgtatagataacgtctgcatcctttgttccttcctgaacatcctctgtcagagtgatgcttccgccggatgcttttgcatattcctcgcactgagcaactaactctgcattcgggaaatatttcttagttgtgcaggctacgaaatgcatgccaagttttgtgcaggcaatcatcagggaattacccatattgtaacgggcatcacccatgtatacaagcttacgtccttttaaatctccgaaatgctcacggattgtcagcatatcagcgatcatctgtgtcggatgatattcgttcgtaaggccattccataccggaacacctgcatgttttgcaagctcttctacgacttcctgaccaaatccacgatattcgataccatcatacattcttcccagaactcttgctgtatctgcaatgctttctttcttaccgatctgagaacctgtcggatccaggtatgtgcttcccattccaagatcatgggcagctacctcaaaagagcagcgggttcttgtacttgttttttcaaaaataagtgcgatatttttgcctctgtaatattcgtgaagctcgccggctttcttctttgctttaagttctgcggataaatcaataagatatgtgatctcctccggtgtaaagtctttcagtgtcagaaagtttcttccttttaagttcataataattctctccccgatgtcatttattctcttttgttatttgtctgtctccgctttcgaatcagtgacgatctctttcagcgaacttgccagacctgcgattccctgaatatccgacggaataatgatcttggttgccttaccgtctgctgccttggcaaatgcttccagactcttcagtgtcagaactgcttcatctgctcctgcctctctgatcatgcggataccctctgcattggcattctgaactttcagaactgcctcagcctgtccttctgcctccttgatcatacgctctttctgagcctctgcgcggaggattgctgcctgtttctcagcttctgcatccagaattgcagactgtttcttaccttctgcaacaaggatcgtagatttcttctgaccttctgcgatcaggattgcttcacgacgttcacgctcagctttcatctgtttctccattgcatcctggatagctgccggaggaataatgttcttcagttccacacgattgaccttgattccccatggatcagtagcttcatcgagagaagctctcatcttggtattgattgtctcacgtgatgtaagtgtctcatccagttccatgtcaccgataatatttcttaaggttgttgcggacagattctcgattgccatgatcggattctccacaccgtaagtataaagcttcggatctgtgatctgaaagaatacgacagtatcgatctgcatggttacgttatcctttgtgataaccggctgcggtggaaaatccactacctgttccttcagatttacctttctggctactcgttcaataaacggaaccttgaagtgaattcctgtactccaggtcgcctgataagctcccagacgctccaggattactgcatatgcctgtggtacaatgcggacgcaggatgcaagaacccataccgcaataacgataataactatcagaaaaaccacgcccataactaatcctccttattctgttttacgataagtttcacaccccggatctcttcgatcgttacaacggtgccttcgccgattttttcgtcatcagcagaacgtgcagtccattcaatgtcattgatacgaacctggcctgtctgcgccagattgtcaatctcctgaatcacaactgctttctttccaatcagactgtttgcattggtctgtatggtttctttgttgaagtacttcattgccagtggtctggtaaagatgagaagtaccaatgaaacacacagaaacagcaatatctgtacagtgaggttcgctcctgcataacatgcaatagcagcgaccagtgcgccgccggcaaaccagatggtggtcagtcctgccgtaattgcctctacaacaagcaataacgcaagaatcccaagccagatcaaaggctgcatgaaactcctcctttcgtctgctatcgtctctgacgagcagcttcatacatgagaattccggatgccatggcagcattcagagattctacttttccacacataggaatccgtatcagacaatcagcactgtctgccgcttcatctgtcagtccttttccctcgttgccgatcaggaaagcagttcctcctgtgtaggattcctgatcataagagttcttaccatgcagatgcgccgcaaatgtgcggatatttctgtctttcagttcctgtgctaatgataccacactttccacatataggaaaggcattctgtagacagaacccatggttgatcgtataaccttcgggtttgtgatatccacgcaggtctttgtcagaagaaccccgcttactccggcgccctctcctgtacggagaatagttcccgcatttcccggatcctgcagatcttccagaatcataaccagcggatttttcccgccgagaatatcttccattatataggaaggtttcttaagcactgtcataattccctgcggcgtctgcgtatcgctcatctgtcgaaaaacagaatctgttactatttcatatggaagtttctccacctgagccatcagttctgcatcaccgctgagagcttctgatacatacaccttcgaaatccaatccctaggtgcttcgccgaacatttttcttccttctgcaacaaaaagcccttgttctctgcgggcttttgttttctggttcagctgtatgatattttttacctgtccgttatttacactggtgatcatatcttatcctcaattttccgaaaccttattcaggtcactgtttgctcctgctgcaacaactgtgcagtctgccggaaacacttcatccggcgccacattcatattcatcttatcgccatgcttcagaccgatcagattgatgttatacttttccctgaccttcagctcccgaagtgtttttcctatccattcccgcgggatcttaaattctgccatactgaaatcagaagaaagctcaaacatatcgacaaatccactggagagaagatttcttgcaactctgatacccatggaatgttcaggataaatcaccttatctgcccctattttctccagtatcctgccatgaagaggattcattgccttcgccatgacaaaaggaactccaagttctttcacctgcatcgttgctgtaatactggcctccatattctcggctactgcgatgaccgcaacatctacgttctgaactccaagcgattccagaattcccggatcacgcacatctgccttgacagcataggaaactttctctgcgatatcctgcacattatcatctttatcgtcaatggcaagtacatcgcagttcgcctctgccagagtaagggctaccgtcatcccgaactgcccaagaccgatcactgcataagatttgttcttcattttcttcctcatttctctttctgaacatgtattcgttatcctctgcgaatatccgcctgactgccgaaccgttactatccaatcataatatcttcttctgccagatgtgaatctgccggcattttctgtacacgtacagtcactgcagttcccagagtcagcggaccgattcttcccagatacatagtcaggatcacgatccatttgcctgctgtattcaggcaggatgtcagccctctgctaagtcctaccgttgcaactgcagatgtaatttcataaacaacatcttctatgggtgcttccggcatggctgcacacaacagcatactcatgagaataagtactgtaagtaccatacctgtcactacaatcgcagaacggatgtagctgtctctgattctcctgtggtgtacttccacatcccgttttccctgaagattggatttcagactcagcagaaggaccgcaactgttgttgtcttaattccacctgctgttcccataggggaaccgccgatcaacatcaatatcaggcacagcatataagttgcattggaaaatctctcctgacttacagtgaaaaatccggctgttcttgtggtaactgactggaacaaagatgccatccacttcgtttccggcgaatatgtcccaatactttccggatttccatgatcaaacagaaagatcagtactgtaccgcccacaacaagtatcagcgtcatcatcaacacgatcttactgtgaagacggagatttttaaatatacgtcccacaggaagtttccctctgatgactcgtttaatcttatcccagatatcccaccagaccacaaacccaagacctgacataatgatcagtcctacacttgtaaagtttacgatcggatcagcaacatactgagccatgctgtcctctcccagcagatcaataccagcattacagaatgcagatactgccgtaaaaacagaatatcccagaccttttgccagaccgaactgcggaataaatcgaactgcataacacactgcaccgattccttctgctccaaacacacagatcagaactttcttcaccagcctgaccatcccacccattctgtccatattataggactcctggataacacgccggttcctcagcgatattttctttctcagacttataaaaataatactgcccagggaaatcagtcccacacctccgatctggatcaggacaagaataataatcttgcctgccagagtccagtgagttgccgtaacaactgtcacaagccctgttacacatatacttgtggttgcggtaaacatggcatctgtaaaagatgtgtggtatccgggtgccgtacaaaacggcagccacagaagtaatccccctaagataatcacccccgcaaaaccgagggtaattatctgagcagtatttaatttatgcagtctgttatataactgcatctttttattcatttgttatttgttgtttttatcatagttatgagaaagtgactggcatacttcccactgatagtcagagatacctttctgcatagcaagtgcttcattgatatcgaagtctacgaattcaccgtgacgatatccgacaacgcggcatgtcttgcctgcaataagaaggtctacagccagagcacccatcatagatgcatatacacggtctttacatgtcgggcttccaccacgctgcatgtgtccaaggattgtagcacgtgtttcgatacctgtggcagcttcgatacgttttgccattgcttcagaatgaccgataccttctgcattgatgatgatgtgatgctttttgcctttcttacgactctcgataatgttattgatcagcttctgctcatcatagtcatatttctcaggaaccagaacgtcctcagcaccgttggcaataccgcaccacagagcaatatatcctgcaccacgtcccataacctcgatgatactgcatctctcatgagaagtggaagtatcacgtactttatcaattgcttccattgctgtgtttacagctgtatcaaatccgatggtatattctgtacatgcaatgtcaaggtcgattgttccgggaagaccgattgtattgattccgagattcgcaagcttctgagcacctgcgaaagatccgtcaccaccaatgacaacaagtccgtcgattccatgttttctgcagatctctgctccacgtttctggccttcttctgtacggaattctgcacaacgtgctgtataaaggattgtacctccacgctcgattgtatcagatacatcttttgcgctcatgtcaataatctcttcgtttaacagaccattgtatcctttcagaataccttttacatttaatccattgcttaaacctcttctgacaactgcacgaattgcagcattcattccaggtgcgtcaccaccgctggtaaggacaccaatggtttttatcttgttttctgccatcttttcttcctccatcttctgaatctatctcatttttactatacacatattcgggtatagtttagcgcatttctataagtttttcaatcctctttctacaactttaacattggttttaccatatttttcgtacatatagttcagccatgagtcctgaatttgtgcatgatatccaaccggaagcttctttatggcctttacgtctttcaggtagatcacaacagcactgtcacccggtgaacgtctgaggtctgcaagcaattcctgagattgctgtgtgtagctttctttattgtcaaactgtatccagatttcccttggcatattgtcaaagggacggattttttcaaggatcagtttactggcgcgatcgtcctctgcagatactctgccctgaataaatactctgccttcttcattcaggaactgctgacttttctcataatctctggggaacacaactacctccactgttcctaccagatcctccactgtgaggaatgccataaccttattattctttgtatatttgatggttttatccgtaatcattccaccgataattactttctgaccatccatgactttcggaagatttgtttcttcatcctgctgaaaatcagaggttttcgcagaaatggttttctccatcattccccggtaattttccagaggatgaccactgaggtagattcccagaacttccttctcatatcccagaagttcctcttttccgaattcctccacatcgggcatacggatttcaaattctttcttgtcctcctcgcttaccagatcaaaaaggctcatctggcctgccagtgaattcttcttatcctgactgatactgtctgaaatcttctgataaaccagcattttctggcggcggttaccatccaggcaatccagtgcacctgctttgataaagttttctactgcacgcttattcatctgcggagagtttcgttccataaaatccttcagggaacgatattgtccgttctcttccctctcttttaccagactttcaataaccggacgtcccacactctttatagcggacaggccatatcggattgcaccgttatctacagagaatccatacattccacagttcacatccggcggcaggatcttaatccccatctgtctgcagaccagaatatattctgcaaccttatttggaaaatcaataaccgatgtcattaatgcggccataaattccacaggatagtaatatttcagatatgcagtctgataggaaacaactgcataggctgctgcatgggacttattaaaagcatatttggcgaaatcaatcatttcatcatagattttatttgccgttgcctcatcaattccatttgcaatacagcctggaactccctctgcttcatttccgtaaacaaagttctggcgctccttttccatgacagaggccttctttttggacattgctcgacgtaccaggtcgcttcggcccagagtataacctgccaggttccgaacaatctgcataacctgctcctgatagacaatacacccatacgtaggcttcaggatcggctccagctgaggacagtcataacggatggtatccggtcggtttttgccccggatatactgggggatgaagtccatggggcccggacgataaagagagattcccgcgatcacatcttccagactctgaggcttcagttccttcatgaagtttttcattcccgcactttcaagctgaaatacaccatcagaacgaccggtgccaagggaatccaaaacctttttatcatcataattaatcttctgcatatccagagtcactcctgcatccttctggatcagctttactgcattctggatcacagtcagagtacgaagtcccaggaagtccatttttaaaagtcccaattcttccagtgttgtcatggtaaactgagtgacaatagacccgtctgatgctctggaaagcggtacatattctgatacgtccttctggctgataacaacacctgccgcatgcatggaggtatgtctgggaagtccctccagacgtcttgccatatcgatcagataatgaatttcatcctgctcttcatatgcttttttcagctcagggttcatagtaagggctttatctatagtaatatttaattcctgcgggatcattttcgcaatggaatccacctgtgcataaggcatatccagtacacggcccacatcccggatcacaccacgggctgccagcgtaccaaaagtaacgatctgaaccacacaatcatccccatatttacggcggacatattcaataacctcctgccttctttcgaagcagaagtcaacgtcaatatcaggcatagatactcgttccggattcagaaatcgctcaaagagcagatcatagcgaataggatcaagctgtgtgatgcccaaggtataagcaaccagacttcccgctgcagagccacgtcccggtcctaccataatgtcatgatcgcgggcatatttaataaaatcccatactataaggaagtaatccacgtagcccatattttttatagtagataattcgtaattcagacgagcttttaattcctctgtaaccggctgataacgttcctccagtccctcgaagcatagcttgttcagatattcccaggatgtaagaccatccggcacatcgaatcttggaagcttggtcacgccaaattcaatctcaacatgacatctctgtgcaatcttatgagtattctccagggcctccaaagcatatgggaaaagttctgccatttcttccggggatttcacataatactggccgccctcataacgcattctgtcctcatctgccagtttcttgtttgtctgcagacagagaagaatatcatgaggatcagcatcctccgcccttgtataatgcacatcattggttgtaacaaggtcaatccctgtttcttcgtgcatacggagaagttcctgatttaccagtctctgcgcaggaattccatgatcctgtaattccaggaagaaattgccttttccaaaaatatcctgataacgaagagctgctgcctttgcatcctcatacatgcctctctgaagatatctggcaacctcacctgcaaggcaggcacttaaggcaataatcccttcatggtactcttttaataccgcaagatctactcgcggtttataatagaatccttctgtaaaacccttggacacaattttcatcagatttgcataaccctgattattctctgccagaagaaccaggtggtaatatctgtcttcgccgcttcctgcttcacggtcaaatcgggagccgggggctacataaacctcacatcccagaatcggattgattccctcggctcttgctgcacgataaaaatcaatcacaccatacataactccatgatctgtgatcgccgcactgtccatgccaagttctttgacacgggctacatattcttttatcttattggaaccatccagcagactgtattctgtatggacgtgaagatgtgtaaactccaactctatttctctcctgttctaatatctgcaattttatcgcagcatatttttataaatttaactgaatcaggtaagtcccatgcttcaattgcgaaaagcaataatcattgggtgggaacttgcttgtctgttactatttcgcgtagattctcttgtccttaatctctactttgccttccttcatcagatggccaatggcacgtttaaatgctcccttactcagaccaaattctcgctggatcacttccggtgatgccttgtcatcaaatggaagaacacctgcaaattcattgatcacttcaaggacattctccgcatcctcattgatctgaagatatgctttctgacgatctgtgacgttcatttttccgtcttcttttacttcgctgacacgcagttccagaatcttgcccggacggtattttcccttggcttctcttgcagggatcagtgcagaatatttatcatcaactgccacaaatacaccgaatctgtcgctgatctcataaacacggcccttcaccatatctcccactacataaggagttctggtggaaagataatgataaaccttcatagttgcgcagagacgactgctcttgtcaatatagagtgctaccagcacatcttctccctctcttactttcagagtctgttcatgatatggaagcagaaggtctttctccagtccccagtcaaggaatgcaccaatccttgttacctgagagactttcagaactgctgtctgacctacctgaagcttcggttcttttgttgttgcaataagacgatcctgagaatccttgtagataaatgcttcaatgctgtcgccttcctttgttccttccggaacctgtctggacggaagaagaacacggttctttgcatctgcctgcatatcctcacccagatatacaccaaaatctacggacttcactactgttaatttctgtttttttcctaactctatcatataatctccatttctgttgtgatagtatctttttaaagaaaattaaaaatatactatactttcatcatcctctgacattagctttatatttcagtataacataaataataaaggcggcacaatgccgccttattattttttattatcttattttacgttactgttcactatagatcagaatgtattttattccaactcgatttcacatacactcagacagattctttatcgtgtattatatattctgcatccacttgcacgccagttctatccaggactggcattctttctgtacacagccgccgtcttcgtggcttgtctcttcgtttgcaagacttaaaccatgtccgccaaccggataaagatgcatttctaccggaatttcaaatttgcgcaacgcattgaagaacaacagagaattctctacaggaacacaatcatctgtcactgtatgccacaggaatgtggttggtgtatctttagatacctggaattccagagactgttcttttctcttatcaagatcattataatcctctccaagcaagcattcaaaggaacctgtatgtgtaaactcaccggaagtgatcactggataacttaagatcataccatttggtttcaccatatcagaagttaccccaagtgtctgtgcaataaaatctttcttccagaaaacgccaagacttgctgccagatgaccacctgcggaaaagccctgcagaacaattttattcgtatcaatatgaaactctgcagcattttttcttaaaaaagcaacagacttcgcaagctgcaagagtgccagtggatatctggcaggttctacgctatagcgcaggatcactgcatgatatccccttaccagatactgcatggcgatcggttctgcttctctgtcagaagtcatagcatacccgcctcccgggcagatcacaactaccggacgctttctgttgatatgcatttcaatggaattatccagaaaataagtgtataaatctgcagtttctttatatccgtctactgcaatttcaatcttcttataaatcataagttcctcctgtatatttcatcattttttccatttctactccccattccgctaattttggggaaatatttacagctacttttctcagttttgttttgccatcctttgctgccagacgcttatataaatgtatatttccatctgcatcaagaacaatataaaaacactctaaaatatgacctgatcctacaatttcccgtgttgtatatatatatcctgctttattcttttttcttttagaaaaaacaatccctctgcttctcctgtctcggaaacttggaaaataatcttcacgtataatttcaagttcttcccatttatacatttttttgaaaaacagatacgatattttgcagccttctttacttaatgttacgacttttgaagagaaaaacaataatggtgcatcaatcaaaaactcaagaatcaatattggaattctttctccctcttcagcagacagccctgtccaaataagcagtaccgtaataagtattaccatggttatctgcaaaaaatctctgatctttattacttcttgctgatattcttttaaatttgtacagtctgctcctttgctttgaattttttttctttgttgcctcctcaattctatcatttcatcatattgtctttgtttttcttcttcttttattccctctcctttttctgcctccactccccattccttcattttttcacgaacatttacgtacatttttctaataacttgcttttttcctttttctaatttataagaaaaaacattgccatgttcatcaaaagtaatgtaaaaacaatctgaaagcggaaacgcatcaacgatcatcctggtagtatatttctttttcttcttatttactgcatatttggaaaatacaatcccctgataacgtatgctccctcctttaccatatgtataccagacatcctctctgataacagcaagctcttcccatttataatttctcttccaaaacagccaggataccgtacagccttctctgctcagcacaacagttctcatataatacaagattaacagcaacattaatatttccacactaaaaattataaattcatatccctctgttcttatttcctttctttccaggaaaatcatcagcattcctatgccgaatacaaacgctgatataaataatatcagtattatatgtggatctaatactcttattttttcctgctgctctttcatatgcatttcctccggttgtctgaaatctttactgttactattccggtatatcaacctaatttcttgcattttcttatgagttcattataaggtaaatatatgtaattgttaaggtgcaaaataaaatgttgctgtcccgtttactgcaaattaaacgaaccatacaatattaaagttcagctgttattatctttcaaggatcatgacatctttttcattcatgctaacggtctgccctgaaacgttctcctccttcgataaagttgcagaaaattgcccggactttctgcaatatggcagaagaattttccttgtttcttctgctacaaaaaatctcccggataagagaagcgcttactcttatccgggagattttttatatctttaacaagttcatatcttttattttcagatcagtgattatttatttccctgtccataatatgcatttgcaccatgctttctgaagtagtgcttatcctgcagatcctgtggtgcaggttttacctgtggattgatcagctcacagcgggatgccatcttggcaacttcctcaagaacaactgcattatgtactgcttcatgagcatccttaccccatgcaaatggtccatggtttttgcaaagtactgcaggtactgcttcataatctttgtccttaaacaggtctacgatcagaagtcctgtgtttttctcatattcttcaaattccttgccttccaggcagcgtgcacatggaacttcaccataaatataatctgcatgtgtggttccataacatgggattgctcttccggcctgtgcccagcttgttgcccatgaagaatgtgtatgtacaactcctccgatattcgggaatgctttgtacagttctacatgagttgctgtatcagaagatggattgtattttccttctaccttatttccatccaggtctacaacaaccatatcatccggtgtcagcagatcataatcaactccacttggtttgatgacaaaaagtcctgattctctgtcgattccgcttacatttccccatgtaaatgtaacaagtccgtatttcggaagatccatgtttgctttgtaaacttcctcttttaatttttccagcatgattcgtacctctccttttgcttttcagatattcttttacaacagctttcagatgttccggcttttttctgcatatcccacccggaaaatctcttaatatctgtattatagcacttgtacggtacatgtaccaacttgtatgttgattattttactgtttctcatacagaaactcttcaggcagatttaccttgaaatcttttgcaagtgaacggaaattgtccggtgtaatagtctgaagtttatttggagtcatagaaagaatcttcaccaggatctctgcagatttttctaccgtatggagcagaccaaatgtcaggtcaaaatcttcacctgagcagaacattccatgatgtgcccagataacaacatcatatttcttcattaattctgctgttcttatggcaatttctcttccacccggtaccatccagccgacaacacctacgccgtccgggaatacaaccggacactctgtagcagattcccataactctcttgtaaagatcttatcatccagtggcagaacaaatgtcagagcaattgtatttgtcgtatgtgcatgataaataacacgatgttttccgtttgtcagtttcttcttcacttcatgattcatcagatgagtcggaagctcactggtaggtctgccgccctcaaccaggccccagcggattctgtaattcattcctgtctcatccaattcaatgatcgcaagacatacttccggatccacgataatatttctgaaatatttaccgcttcccgttacaaggaaaaactctcctgctaatcccggaacctctaccccgatcggtatccattctccaggtgcattcagacggggacgaatcatctctacttcctccggtttcagacgatagcttaagtttccgccgtttctctcatgccatccctgaagataaccgtcatttgccattttgataaatccctgtacaaatttagattccagaattttcataatatatatctcctccgctttttgtggttttatgttgtttgtttttaacaatatattgtttcttgttgtttatgaatgtattatatattgtttcttgttgtttgtaaataatttattcaaaaaatctctcacaaaaccacacatcaattccgaaatatctttgtcaattctgtcctgctattcatcctgttcagaagatttttaccattatttttgctgaaattctataattgcgtatgcttttccgtctgtatcatcaagcgatacagtcacctttcctgtttctgcttttgctttcgggcagattatatctccaagttttgcctgcatcttatactctgcacgcatctggtatactttgaaatcttccggcaggaaatcttctgccatacagatatactgacagttgtttacatgatgattagtgtcaagatgatgcttctgcactgtgaatgattcctgtgaagtcatgtcatccggaagtttgattttcctcggtgcataatccatttccagcttttcgccgagtatgtaattgtctatatctgcaggtgtcagtctcgccggaatccctgtactgatggccagatgtgtccagttggagttcgcccaggcaagcttcttcccatccattgtttctatggtgaaattacgcatacccatgaatcctttgaaatcataaggtgctgtcgtgatcctgatttccgttcccatagcaggatattcatccacaattacctgccaggaagaaagaacccacgctctgtctcttgccttcagcacgtctcctccaagcccgaccgactccgcatgaaatgtacagcaatcctgaaaataattcaaaacacccggtaatgtcagtttgccgttctcacctgtctcactgtatctgactctgctgttaaaactgtaattcattttttatgtcctcttttcttatgtcgctatgattttttaatatacttcttttctattattataacaagccaaaagtataaggcataaaacagttttttataaactgccctatgccttatctttgttctacgttatattatttactgtaattctttgctacaaatgtgatcattaccttaaacagatccccatccaggtatagcttaaactcacctccctgcagctctgtcaggctctttgcaatagataatcccagtccgcttccttctgtatttctcgccacatctcctctgataaatcgttctgtcagttcatccgcagagatattcaagggctgtgctgaaatatttttcagagaaaaagttacttttttatttctgttgctgatttctgcataaactctggtgccttccattgcatacttcacaacattaccgaatacattttccagaacacgccacattctctggccgtctgcgtagataatggacggttcgtctgtgaaatgtaccatcatagtcaggttcttctccttgaatttctcttcaaattctccgatcacctgctgcaccatttccacaaaatcaatatcattcatctccagcttgatgtttccggtgcttgccttggatgcctctaccacatcctctgtgagcaccttcagtctctgagatttctcatccaggatgcgtaaatattcctgtattttcggatctgtcggattttcccgtttcatcagatctacataattgataatggaagtcagaggtgttttcaggtcatgggaaacatttgtgatcagctctgtctgcattctttcttttttcaggctgttctccacagcagcatccagaccactgccaatattgttgatatattctgccatcaccttctgttttccggtaagtgtatctgttttgatcttatactgcagttctccatcgcttattttcttcagaccatccataataagatccagtccgtccgcttttctgatggcgaaaatcataacagccacatctacagccatcaatgccagcagaaatactcctgcaccactgaatacgcagccgatgatcaggaactgcaaaaataaaaatgcacctcccacaagcagaacttttattttttctgctgtatttctggaaaaagctctggcaaaatcagcaagcttcccactgcattttccaatccatttcagaacttttctaatcagactgtttttccataaggttcctgcctttattcttcttaccaggctgagatatccgatcagaaaccatgccattgtataagtcccacatatgagacagataacaatcactgtcactactacatgactgtaacccaatgatgagttggcgatcaaggttcccgatatgatcgttcctgccagccatataccgattactgttcctgccgcaatttctgtataccatctgtcaaatccattcagatgtatttcttcatcctctggtctccttcctgctgtcacagtcagccacaccataccgatcagccagagcacacttccgaagattgctcctgccagcatcggaaacataagctttgaatatgtctcatagttctctgcctcatcagccatggaatctgccacagaaaatttcgtatcaaccgaaactgcaaatacaaaatcctttgtgtcaaagctctgatcaatggtatgattccacacctgcagatctgcacccggaatatttgtaacacactcacttaattccgggtaaacaactgcatatgctttttccttaaatattttctcaaggttctgctccagctgtgcgtaactgctgtacgcttttttatttgtatagattgtctgtgtttctttatctgcgaaaagatatgtgaggttggtactcccttcggtatagtctcccacgctgtgaaagacggatgccagtgatgtttcataatcattgaactgttcatctgactgtatggcacggatgcagtccagaagtgtgaataactccttatatgcatcctccagtctcccattccattccgtgcttttgtttaccgcatccaggatattctcagctccctgtggtgcaaatttctcgtccagctgactcagttctacgaaaaaacatcccggatattctgtgtttgttctggtatccgtaacgttgccgatattctctgattgtgaggtatatctgtaataaagttcatctgctacggtatccagtttctcggactcggtctttgattcgaaatcatcttcttcaagaaaatctgtattgtaattaattttcagtgttccatctgccaccatctttttaaagtcagtccgataaaaatagtggctggttccgtcagaagattcacatcttatgacctgtgaatcttcgtcataaacaccttcataatagtttgcctcccagtcttttccccactccagaagatcacttacagagtacgcaagcccggaagtatttttcagagaaaggtctctgatggaatcacgggtgtttcctttttcctcaaattctgccagatcaatcactgccgatgaaccagcatttttcagatagttaatgtcatcctgcgctgccagactgaccagaatatctgatcctctgttgctgacctgtttctcaaatgcttctgattctgtgtaacttttgcctctgtcatccaggcggattccagtctgatagatcatcacaaacatagctgcacagactgctgctgcaactgctgccagatgcgcgatcacgatccagattgccttgacagaactgcttctgtatccttttcccttcataatgtttgtccctttccttttttatttaatttattactttgtcaagcggatattcgcaatccgctttgctacttgctcataaccaaataactgcttcgcagtttatcagaatgcgcttgcacgcctcctgatacaagcaagtccccacccactgcttattgcttttcgcaattgaagcaggggacttacttgatttggttaaattttttccaccttatatccaagtccccacacaaccttcaggtatcttggctcccttggattaatctcaattttttctctgatatgccggatatgcactgccactgtattatctgctgcaactgcttcctcattccagatgttttcgtagatctgattaatggaaaatacccttccctgattcttcatcagaagaaacaggatattgtactcaataggtgtcagcttcaccacatcaccgtccaccctgacttccttcaggtcatcgtttatgctcagacctcctgtctcgtagatatgagcattctccacaggtattgctgctcccagccttgtatatcttcgaagctgtgatttcacccttgccaccagttccaggggattaaagggcttggttacataatcatctgcccctacatttaatccaaggatcttatctgcatcctctgatttcgcagaaagaataatgatcggaagaggattctcttcccttatcttcaaagtagcccggatgccatccagcttcggcatcataatatctatgatcagcagatccaccgactgactgcgcaatgcgttaatcgcctccacaccgtcgtatgccttcaggaccgtatagccttcctgctccagataaatactgattgcctctacaatgtctttatcatcatcacagaccagaatattagccactttacacacctccctcatcatccgaaatgcctgtctgaaatctctcatgtacagacatcccggcttcttattttgtatttctgatattagaataatcgaagcttcttaatatgaaagggacaaattcttaagattttcttatgattattcacttttcgcagtcaaaatatcaggctgttaatctgtcacttttatcaggctcctattttcatccaattcttctattcgttctgctgtatacattttttatctcatcttttctctttttctgacagtcaataatagactgaaaatcattatatcatttcacatatattacttctatagaatattctcttctgtttcccatttccacacccatcactgtttattccattctccataactcacaaccaatctatagcaaccctcgtaaataatacttccatcaacgcaccaggggatcatcgttatatgttttttggtattttattaacaatcttcatacatatcgcataattttttattgattttgtacaatattatttatttttcggcaaaacaatgctacaatgttttacaagattagagcgtgtctgaaaaaggctttctgcaagatgtgcgtcacaatttgtggtatattttgcccggatgagggcgccgtagcgggctacggcaactgaattcgggtgaaatatcccgcaaagtggggcgtgcagattgcgggaatgatttttcagacacactctagtgtactgatttataactgttcaatggtctgctaaccgcaaagctactgaacagttacacgttttttttcaacgagggaggtattcttatgaatctggaaaacatgacaaaaatctacgcccgtggtgacagccgcattcagctgaaggtaattcccggacatttcgtcacatctcagtcacatatcactcactatctggatcttacaactatgaaatccagaactgccgaagcacagaatattgctcacgaactggctgctaattatgaagtatctactcctgttgataccattatctgtatggacggactggaagtaattggcgcatatctttctgaagaacttaccaaagccggcattttttccctgaatgctcatcagacgatctacgtgattactcctgaatccagcaattccggacagattatcttccgtgataattttcagccaatgatcaagggcaaaaatgtactgatcctcaatggttcgattaccacaggctctactttgtccaaagcaatcgagagcattctgtattacggaggcactatcagaggtatcgcagccatattcagcagagtagacagcgtggcttctctccctgtatattctatttttaacaccaaagatataccggactatcattcctattcatctacaaaatgtccaatgtgtcagaggcagcaaaaaatcgatgccattgtcagcagctacggatattcagctctgtaaatcttcgaagtattttataaagaaattgttaccagaattgatgactttgtctggggaccggtgatgctgatcctgttggtcggaaccggtatcttcctgactgtgcgcaccagatttcttacatggcgtaaccttggctatgcactgaaaagcacactcagcaaggaagcccgcaccaagagccgcggacagggagatgtatctcctttttccgcactggcagccaccatcggtaccggaaatatcgtcggtgttgccacagccatggtttccggtggtcccggagctctggtatggaacttctccgatatcgccaacgcactgatggctatcccgaacctgatctgcatgctcctgttaagcggcgagattgccaaagatgtaaaagaattccagccggagattaaaaaatagttacccacatcattctttttatcatcctgaagtaaaatgcagccagaaccttgttccgtcaggttctggctgcattttacagaaatcttgtacgccgggtacaaataaacacttactttattgatggcatacttccatatactgttttacatctgaagcaattgatatatatggtgttccatatgggatccaggttgactgaaaagcatgatatacatctgattttcccggccatactgttcctatcacattattattttcatctaactgatgaaaccaggaaccatttttatgatccaataccttatcatccagatatctcataaactcttcataatcttttgcatatttctgcttatgagttatatgccataagactgctgatgtattgattgcctctgccaatgtccaatgcattctgtcatgaacaacaggttttccatcccagtcagtcgtatacacaattccaggatttccatccacattccaggaatcttcaactgctctgttgtagagtttctctgcagcttttaaatatacttctgcagaatcaggggtatctttataagaagaatatgcccactgcacgatcaatctggcccactcaattccatggcccggtgttgctccataaggtttaaaacgatcagcaggacattctttattgcaatcaagatcagctttccattcctttgtaaaatgttcaggtattctccagtcatttgcgcttgcccatccaataacatgatctataattcttcctgcacgtattctgtacttttcttcttttattgcatctgctactgccagaaacgcttctactgtatgcatatttgcgttaagaccgcgataatcatcaagaactgtaaattctgtattccaggtatcataagtaagtccctgtttctcatcccagaaccgtttatcaaataattccaatgcatctttaagcagagtttctgcatctttttctcctgccagcaaagcagaagaagcagccagaagaacaaatgcatgagcataacactgtttatctggcaggaatttattatccggtgtaattcccggataccatcctccattttcacgatctttcagttcttccagtaatccatgttcagcaccatggaccagtgccggactttctttatccccaagcatgattcccatactatatacatggaccatacggcatgtgatccatgtttctctgtttctgtctttccatggtgttccatcatccccaaggaaataagcacttcctcccggtgataaaaatccttttccaaaatttaaaagatttttctgcaattcacctaagaacattttattttcttctgtatctatctgatattttttacccgaattttccatcttaatcttacctttcacttccaaaaaatttcagtttctcttatagcacaaaaaagcacctcataccgaggtgcctcatgtagcagggctacaaggattcgaaccttgaactgacggagtcagagtccgtcagaacatgcgtcagaatccctgtaaattcaggcttcctcgccttataattttttaaattgacctatcagatttcttatactgatacaggtgttttcatctgttctgcaatttccttgattctgtcaattccatatcctgtatatttcgcaatcttatctattggttcgttaccttcaatcatcatttttgccaatgataaatttttctgttcgattccttttccaataccttgttcgattccccgttcaatgccttgttcaatgccctgctcaacaagtgctttacttaaattacacatatcacgcacctcactttcaaactctgctgtcattgcaatatcaaactcatcatttaaacgtttcttcttttcttctggtgttgcagttgttgaaaacagcacatttaacaaatccagaatttccagatcactgctttcatccgcatcaccaagattaagtatgacaacttccataaggtcatatgcttctaatttcacaaacgagttaccacgaacagaatcttcaacggtatgatatctgaatattccattcttccttttcttcgccggatcaggacatatccagatactatataccttctgtatcttctcataatgttcatctgtaaagaccgttccatactgctctgaaatcattctggcacaatagtagaaacctcttgttaccagtggatatcccggtgtatcatttaactgaatctccagatttataataagctgtaccggctctttgctctctggcagggttgctttaaaacgaatatcataatacactgtctggtctttgacagcatttgcctctgtgtttaaaccatccaaacgtttatcgccatttagtctttcatcacgattcagctgatcctgatggactgcatgttccgataactccacattttcattcagacaattatcgcagataaattttacgctatactgcgaaaactcttttgtacaagacttcaaaatccaggcaataactgctttatacgtcagcaattttttcgcacattcatcatatcgtgctctgtctgccgccagttctattgtctggctatatctgtttgccgttccataatcatcatctcccgcaagcatgtcttctacttcttctatttttatgttaccacaagcatctattttcagcaagtttccctcgaaaaaacatttcgacaaaagctcctatgctgagcaaatcttttacgctacagttgtctcttcttttattccgggaagtttaacaacctgtcgtacctctccatttgaaactacctttttacggatagcaatataatatttttgagttgttgactcaagatcaccaatataggcagctatctcctctactcgtgcaccactttcatacattctggttgcaaatgtttttctgaaaatatgcaatccacctttaactccctgtaattctgcatttttcataataactttcatgcggtgttctaaattagaagctgtattaatctttcccgtttttgtggtcactataaattcatctggcagactgctgtcccgactgtattttattttctgtaagatatattttgcttctttattcagttctatcgttcttgccttttgattcttagtgctaccttccagagatacatagttgttttcttcatcagattctttatttcgattttttaccatggatatacttttctcaattaccagataagctccttacaactaaaaatccccattttttccatagtttcacctgtgacaaaaatatttgctgaatttttatgtgatccaatatcagctcctgcaagatatccttgaaactttctttcagaagcgtgtatatatctgcaacgctattactgttgttttctgagatgatctgtcgaatttgttcctttgcaactgccataaaaaatacaaactattttacactacctatcttttagtaactgttcaacatccttgcaagataatagactgctgaatggttacttaagatctatatatgttggttcaccagcaccaccaataattttatcagcaatatctaaatcttcatctatttggattcgaaacttctccccaaccggttcccatccataattattttcttttgaatatatctcgtcagaatcagttttttcctgtacataatattcatcatccagttgttctgctgattgtaaatcccaccggatttttctctgatacaattgtaaatcgagatattgacagtttttgtctggcagcgacatctggaagttatcctcatcaactacatcgccttcttcatagtcaccaaaaacactggtttcgaacctcaattcattttccggtccaaatcctgcaccttcaaaactcactggattgccaaaactatctgtgcctttcagtttcaattcatattcattaagccatttatcatccggagtcaccccaagtgccgtaatcctggaatgtaaatcgttcatcgcaagttcctttaaaatcagattacctccatctccacctgaaatttccatattcattttctttcgtatcgtctgctcttttaattgctctgctgtaatagtaaagtcataaacaaactccgtaatattctcagaacgatttttctcagaaattggcgcgctacttcccacatccaaaacaagatgtatctctgtttctccagctggcagttccacaccatcatactcctgcatcagaaccatttctgtatccatctcatattttgtataagagtccaaatccattagccctgtcgtgctgctaaaactctgatatcgcttaccattaatcaatgttttttcatcattaatccataaatatagagattctttctttttttcttcatagtcaggttttactgatacaatcaaactataattatccaaaattacttcgttgattgttaatgatatcccactctttgtctgtacctgatttatcacttctgtataggcagacaaatctttggaaaatcccatcagctctcctatttttgtagtaaattctttaactgccgcctgaacatgcgaattaccagccactgtgataaaagccaaaaggattgctgctgcctgaccgatttttcgcctgtacagcctgaaaatatcgcctctctttattgtccatggttttcctgcttctgctatcagttcttcatcaacctttccaaactcttgtgaaaagtctaagtattttttcatatcaacacctcacatttcaaaatacgatatagtttttttcgattacggcataaatttgttttaatacacccttgggatacgccatgtcttttcgcaatatcctttatggaatccagataccaataacgcctgataaaaatatccctgtctgaatctgacagttttctcagaaaattttctatgatttttatcagttctttttccgcgattttttcatccactacataagaaaagcttaattcatccatttcaccacaaacgtcagcaacatgcccatccatgcgcttcgcagcctgctttttacgaaaacaatcaattgcaaatcctcgtgcaatttttccaacatatgcagataatacagacggcctcctgggtggtatatattcccacgcagcaagccacgtatcatttaaacattcttccacatcctcatgattatttaaaagattccatacaattttataacaataacccgaatacttattgcttaactcctgaattgccgtttcatctctgttaaaaaacaactcgataatttttatatcctccaccgcatttctccttttattgtttcaataagatatgattattcctgcaggatatcatcttcttattatataagtcgaaaaaattatacataggttacaaaatttttcaataaaaaaggaaaaagacccacactccttcaagtcacacaaaaaaaagacacctcataccgagatgtctcatttagcagggctacaaggattcgaaccttgaactgacggagtcagagtccgttgccttaccgtttggcgatagccctttatgttttgttttcgctacttcgttcgcgacaattggtattatataatagtcttccggaaaatgcaaccccttttttgaaatttttttaattttttttatttttcttcaaaaacatgaaaataccgcctatttccgggactttttttatgtactcagagtgaaattatgctataatcaataaaaacttattgctgtttataataatgtctttcgcagaactctaaaacagcaggaaatatttttacgaggaaattttaataataattttgttctcataatgagatattattattaaccaaaaaggagagctatatatgagagctaataatcttactctgctcacagacctttatgaacttactatgatgcagggctattttaagaacccaacaaaccagactgttatcttcgatatgttttaccgtaccaatccatgcggaggtgcatttgccatcactgccggactggaacagatgattgaatatattgagaatcttaaattcacagatgaagatatcaaatatctcagaagcctgaatatttttgaagaggacttccttgaatatttaagcaacttccgtttcacaggtgatatctatgcaattcctgagggaacagttgtcttcccaagagaaccgcttgtcaaagttgtagcacctatcatggaagctcagcttgtagagacagcaatcctgaatatcatcaatcaccagagcctcattgctaccaaagcagcccgcgtttgctatgctgcaaagggtgatgcgatcatggaatttggtctgcgtcgtgcccagggaccggatgcaggtatctttggcgcacgtgccgcaatcatcggtggatgtgccggtacttcctgtgttctcacaggcaaaatgttcgacgtaccggtccttggaactcacgcacacagctggatcatgagcttcccggatgaatataccgcattcaaaacctatgccaaactttatccgaatgcctgcaccttactggtagatacctatgatgtcctgaaatccggtgttccaaatgcaattcgtgtatttgaggaaatgcgcgaagaaggtattccgcttaccaaatacggtatccgtatcgacagtggtgatcttgcctacctttccaaagaagcatataagatgcttgctgctgccggatttgatgatgcagttatttccgcttccagcgatctggacgaatatctcattgagagcctgaaggctcaggatgccaagattaattcctggggtgtcggaacacgactgatcactgccaacgataatcctgcattcggcggtgtatacaaacttgctgctgtcaaagatgcagacagtactgaatttacacctaagatcaagctttccgaaaacacagagaaagtaaccaaccctggaaataaaaccgtatatcgtctctataataagaaaaccggaaaaatcagggcagatcttatctgccttgctgatgaaaagcttgatgcagaccagaacatggttctctttgatccaatcgatacctggaaaaagacaaaagttctcggcggaacctatgaagtacgcgaacttctcgttcctgtcatcagagaaggtaaacgggtctatgaatctccatctgttatggagcttcgcgaatactgccagaaagagcagaatactctctgggatgaatccagacgtttcgtaaatcctcagaaagtatatgtagacctttctcagaaactctgggatctgaaaaaagatcttctggaagaaatgagtgagaaagctctcgactgagcataaactcagattaagagtaacaaaacagacaagtccccggctccaaccgcaaaaatcaacaggcagttgaagccggggacttactttttgattcagttaaaacatatgctgacatcacagatttcgcttttagtcccaactctcatatttggtccaaaaagccctacaccggatgtaacaatattatgcatatttcctttcttcagataaccacagggattttcccagaagaatctgatcacaatatttcccggaaatacctgtccgtcatgggtatgtccgcagagatctacgtccacacctgtatccgccagttcctgaagttctctcggctcatgatcgataaccaacactggtagtgacacatccataccctctgtgatttcctgcggagtctttcgtttatcaatcccccgtccgggacgctcataatccggtctgccatacagataaaaggaatcatcgatgagcacatattcatctctcagaagcgtaatccccgctttctccagaaactcatccatctccggggtactctctttcttttccttactgccaaaggtaaatcccgccagaatcttttcctgaatatcgtggtttccgtaacatgcatacacgccatacttcgaccgaatccctctcaatatctccgccagtttttccggatcatccagtgcctcatattcattgtcaaaaatatctcctgccactaccaccagatccggtttctgctcattgatcttctctgtcatctgctccatctgcttgcatccaatattatatcccagatgaagatctgcggccagaaccacctttaactccttcatatttcctgcctttttatcaacagaaatattgtacttcgttgtatgtatatttccagcactgagcactccgtaaatactgactgttgaaatgatcaccgcacagacagctcccacaacagcagttcccatattgctgaaaagcagttctcttcccggaaaaccaagatttctaagaggatatttcagtaacagtctcaatccatccgcgattcccagagtcataagtgtatacatcaaaacaccgagccagtaattactcagaagcttcataaatctcctgaatcctgacgcaggtgccataaatgcgatcagtatactaaacactacaaataaatatacaagtccaatccccctgcacacccacacattccgaaaaaccgtatgcaatacctgaaaccagtgcaggctgcgaagcaggatatatacacacaccaacagataaaacggtgccagatatattgcagccatataatatgtctcctttccaactctcattgccataacaattccagaaaatcataactgcttcttattatacaaaaaagaatcctcagctgctagtgtgccgacaagttgattcttgaaacaatcttgcaggataaattttcttatttcaaggcggaggaaggaggcgtagcggtggctacggcgaccgacgacaacgcggaaataataaatttagacgcaaaattgttcgagaaatcaacttgtcggtacactaccctaagctgctgaagattctattaattttactgttccatctgtcttcccagaaatccgcttgctgttctgatgagcatcttctctgattcacccatcacatccctttcattctttcccagtaaaagcacagatcctattgtatctcctgcactgataataggctgcatgatctgggaatacaaaggttctctctgttcctgagtcacaggtatcctgcttttgtcatttccgttggcaaacacagagcttctttccgtgattgcatcttccagagctttgctgataggttttcccacatattccctgcttccctgtcccgcagcagccaccacctgatcgtgatctgtgatacacgctaccatcccgcttgactgcgccagcgcctctgcatattcctttgcaaaaacattcagttctccgataggggaatactttttcagaataatctccccctcccggtcagtaaaaatctccagtggtgtcccctcttttatccgcagcgtttttctgatctccttaggaatgaccacacgccccagatcatctatgcgccgaacaattcctgtcgctttcattcacttttcttcctcctgtttttccttttatcgaagtttactgtctttgtacccttcagtttccatatcatgtgttgtatggttattatgtggaaaaacaggcagaatatacatttctgtatttacaaaaaatgccatttaaccacaatcaggcggttaaacctgagtaaaaaagaaccccttcaccaggcagtatcaatatctgcttaaagtgaagggatttcctcatccatcgttatttattttacacgataaccttcgcaactgcaagaccataaactttaagtttatcgctgccattgccataaatccaactgatctcgccttccggtacgggaatgcttacagcttctgttccgaaattctgataaatataatatttctcattttcacactctctcactgtaatctccagtgcatccgggatttcttctttgattccgcaggaaacgccgctgtctttgagcactttttcaaggaagtctccatagaattctttatcagcatctgctgccacataccatgccttacctttgccatattcattcactgtcaggcaggaatagccttcatagaaatcacttccgtaggtcattaaagtacgtgctccgcgaagctccacaaggtcgcacagatatttacatgtataagtcttatccagtccaagttcattgccagccacaggaacaaaagaattttcttcccagtcataaaggccgtcaatttctgtgcttctgattcccagcacatccatcagaccatgaggagttccttccagataacacctgtctgtgtcatctgcaattccggaccagtaacttgtgatcaatgtaccgccgttttccacgaacgcacgaatctttttggcaaaaccttccttgaacatataaaccattggaagagccagtactttatatttgtccagttcacaggtcatatcgatcacatccacattgacgccttgcttccggaaacctctgtagaatttcaacattgcttccagataatgaagccctttatttctgggtccctggctgtcctccattgcccactggctgtcccagtcataaagcatggcaaccgagctgttcacagttgttcctgccagttcttttaactctttcagaacttctccaaccctggaaacttctttaaacactcttgtatcatttccaccgtaatgatcgatcactgctccgtggaacttctcagaagcacctctgctctggcggatctggaaataaagagcaccctctccgccatgtgcaattgcctgcatggactgtgcaaaaagcattcccggtttctttaatttgctcacactctgccagtttgtagaagtcgggcaggattccatctggaaaaacggctttcctttcagagaacgcatcaggtcatggcacattccattgtcataagctgtatcgatcacagcctctttatgccatgtaggataggtatcccaggaaaccacatctatctctttcgcaatcttaaaataatctaaacctccaaaataatgcatcaggttagcagtagtcggaagtgtgcttcctccctctctcagtgctgcaatctcatgatgaatgaaatcagcagtctgatgagtgacaaagcgtttccagtccagattcagtgcatgaagctgtgtctcaccaatcttagacggactctcaatctggtcaaagctgttataggtatgactccagaaagtggtacaccactgatcattcaggttttcaatagtctggtatttctctttcaaccagttacgaaatgcttcctgacacaatgggcagtgacattctccgccatattcattggaaatatgccacaggatcacacccggatgtgtggcaacctcctgtgccagctttttgttaataatatgtaccttctctctgtaaacaggagaagtataacaatgattatgtctgaatccaaataacgctctgtgacgcgtttcatctacacgaagtacctccggatacttatctgccatccattttggtcttgcacctgacggtgtagccaggattgtagaaattcctcttttataaagcttatcaatgatctcctgcagccatccaaaatgaaatacaccttcttccggctccagtgtggaccaggaaaaaatcccaaggcttactacattacagccagactcctccagcatatcaatatctttttccagaatatccggtctctttaaccactgttccgggttgtaatcacctccatggagcagcttatccgttctaaagtccatacttgttctcctcttaattctctattctcagtcgttttctttttcactatcatatttaatactctatccaatttcaaaacacactattctcgctgcttattacttttctcagtcaaaacagacgggatttgatttcattcttcttacaggatatagtttgcaattactccaagtttgtttgcgcaaccgattgttcatatttttagtatattcctttatattaataaagtcaattagccattattatctaatttcgaatctcttttttgtcatatcacacaattcatgactgatttttccatttttcaaacacacacgaatcctgcttgcaggattcctccgcctgtggcgagtcgcttcaacgacataattcctctcttccacaatgcgatcctgcccgggaactttttatgttacagaaacattatgaagtaatttcccatgaaaaaaaatcctctgattattgattctccaataattacagaggatttttcatttttctactgtgttgactcacgcagcatcacctgataattcagagttaacgtatcctccaaaggcttctccccgaggatgttcagtaatttcgcacatgccatctttcccagtcttaccgtatcaaagcgtatactggtaatcggtggattattatattccagattcttactgtcatacatactggctatttttatttctgcaggaaccgatattttcttttccctcagactgctcagacacatgctgcagatcacatcatccatacagacaataccatccgcgccttcttcaagcagtctcttcacagcatcagatactgctgcctgattatccgtatccatgaagatcagattttcgttaacagaaactcccatttcctcatgtgcttccagaaaaccctgatatctgcttccggtaacattgtaggactgatttccacccagaagtgccagattccgaaaacctttcatcaacataatacttgtcagttcttttccggcttcctggttcttgttatctacaaacggaacttccggatctgaagatgggccgatcaatatatatggttccttacagttcttcagatatttctgtaccttggaacttaccactgctctgcttacaatgatcccatcgacttttcgatttgcctccagtctctgtatctgcgatacatctgctccatcaatcatagaaataataatatcatactcataggaggaagccatctcacagattccattcatacagtctttaaaaaaaagaaactctgtggcaacataatccttcggcatcagcagtgcaatattataagttttacgctgtgccaacccctttgccacaacattgggtctgtaatcatgttcttttataaatgcccgtactctgtctcttgtagcctgactgattcttccctttcctgaaatagcacgtgataccgtagtcttacttaccccaagctcccgggcgatatcttctattgtatatatcttcttttcttctgtttccataaaataccccactttttgcgcaaccacttgattatattctataaaataacaaaatactcaagcacttacaagtaacttttaaagaagatataccggcagttcctcattaatatgaacagaaccttttgctgtttttttcttttcttctgtaacagatattgtttccggtttctctgcctcttttgtggatacaacgggcttctttacggttttcccggcacctgcatttgctgcacgccgaatactatccctgcctactgacataattccatgacctcctctgccaatctcgtatattccctggcacttctgcttgattttttatattccacaaccggaatactgttatcctgtgaccattctacagagctgtccactctgatgatctgctcaaatacatgaatatcctcaagttcatgcagtgtttccattgtctgtttataataactctttcttgtatctacctttgtcactgcaattccggcaacttccagttccggagtaatctgctttacttcattaagaaattcaaacatattcgcaagtccgaacattccccatggacttgcctcaacaggaataattacccggtctgatgcacaaaggatattcatcacccaaccccccagcgtaggaggtgcatcaatcagaatatagtcataatttcctgcatcctttatcttctgaatgcattttcgcaggataaattctctctgccattttgtaaaaagttcatattctatagaactcatcaatgtagatgatggtatcagatccagattttcgtagggagtatgtgccacataaccgctgagctcttcctgttttccgattgcgcaatacagattcttctctcctttcgcctgctccagcacccagttctccggaaaaaaggcaagagaaagatttaactgcatatctccatcgatcagaagaacctttttccctgcctgagccatcgccgctccaaggtttgaacaggttgtggtttttccacttccacccttattatttgtaaaacatatcgttatggtttttcccatggaactgtctcctttaccacttactttacttgtattataggagatttatcatatagattcaactgttttcctcatcttcgcaaccctgtaactcatttgcattgccggacaaacatttctttgatttccaaaataagcccttgattttttgtttttttgtgttatagtatttatatacttgatatatagtttttaaaactatgttatattgttttcattgtatttatctgaatgaatggaggcgtttttatgaaatttaaattaaaagatcccggaagtgcaatcactcatggtattgcccttcttctcgctgcagtcggagcagttcctcttattatcaaggcagcgcgttcttatgatgtgctccatattgttgctttaagtatttttatccttaccatggttctgctctatgcagccagtaccatttaccattctgtagattctacagagaaggtcaatcgacggttgcgaaaaatggatcacatgatgatttttgtgatgatcgccggaagctatactcctgtatgcctgattgttcttcataaccgcattggatatattctgtgcgcgctggtatggagtattgcagtcctcggcattatcttaaagggctgttggatcacctgtcccaaatggttgtcctctgtactgtatatcgccatgggctggctgtgtgtactggcatttgttccaatcttccatgcactcccacgtgcaggatttgactggcttcttgcaggcggaatcatttataccatcggtggtgtgatctatgcattaaaagttccgctttttaattccagacataagaattttggttcccatgagatctttcacatctttgttatgcttggaagtgcctgccatttcattgtcatgtacttttttgttgctccactacctgtataaccgtcaatttgccaataaacaaaacaaggggttgcagcaccggatttttttcggtgctacaaccccttaacaatacgattttctctgctgcagcataatccctgcaggaaagcttttatattacacagctactcttctttccggatacaatccataggatccatatcccacgccaaaatatccataatagctcttcgcctctgcgaacagcggatcatatactctgcctccgatttcagcccagcaatgaccgcttccgtcagttgccgttgtatctacgcagacataaacattcttatatccaagagcctttgcaagataggcaaacgaacaggcatctgagaaacagtccccgccttttccgctcagtatcagataatcgtttgcatataacgcaggccatgcagtctgattataaaatattcttctggtatcgtaataatgctgatacattacccatctgaaacaggtttcaaatttctcactttttgacatactcggttttgtgatcttgctgacaacatcctttgctctctgcaaagtctcatactcatacgctttggtggaattcattttctttccatttggataataaatcgtctttccttttttccaggcttccagaattcccttttctgtacaataataaattgtatttccaactttaactgttttcgttctcagaacacccttgtcactaaaatagtaatattttccgctgattttcttaacgccactgtaacgtattccattggaaccaaaataatatttcttgttattgtatttgatctatccggttttcataaatccttttggactgaaataataaacttcaccatggattttacgcattcctgtaagatactgtccatctttaaaatatttcttattttttgttccatactcataccagccatttttcacctccggtatgggtgttggtgcaggtgtctcgattggtgttacatccggagccggtgtttcaatcgggatcggtgttacagtaacatccggtacttctgctgccatggccggaacactgcccatcacacatactgcgcatactgcaagccattttgtcatctttttcattttctcttattctccttatctgacgggttcagaagctcagcaactccagttttttatttctggtaaattgtttaatctcatattcacgtctcatcgcttcttcttttgttgaaaatccttcataatatacaagtgtaaccggtcttttggtccttgtatatttcgcgccgttctttccctcgttgtgtgctttcatacgtttttgtagacagtttgtccaccctgtataaagagtcccatctgcacatttaacaatgtaagtataattcatcataatcacccgacagtcatatattataatcaagcaactgtcttattgtctggaattgcattatttgaaattttttataatttatgtaaaggacaactgctatcttttgcggtcgtccctgtttctataataaacagtcggtttaaaacacgtatatcatccggacacatattctttctgacagccagatctctcagcaccagaaataccaatatgtcaaaaaagcaggcagggaaaccgactgcggattttctttcccacctgctttattatacgtttattttcttattttgtgaatatcatttttcgaagattccagagatttcccatgaattttccgccttttacctttagctgcagatcttcacgatccggataatatctggttgagaatacaatctctccatcattcagataaagttccactgcagaagtatctgcaagaatccggatattgttcagttcactgactttcgctttccgcttatttcttcctgcacccgcaatttcagaaaatccaatctccgcaatttcattttcatatttaaagagcatctgtccgcccatactgatctgaaaacttctgtctgtcactgcaatatcttcaattaacagatcaaaaccttcatttacttctacacgaacctcaacaattgatttttcatcatcaagaattgttttctcttttcggagtctctccagttcttttgccggatactggaatatttttccagccttcaccctcagttcccgcggtacggtaagacaatgctgccagccttcatcaatggttttattggtatattcctcctctgcatccggcattcccatccatcctatcagaagtcgccttccgctgttatctgtaaaggtctgtggagcataaaagtcaaatcccatatcccactcacgaaagtctctttcatctacagagccatcctcttttaccggaaaatagcctgactgatagatattctgaaaacgaaattcttccctcttcaagccctgtggtgatacagacagaaatttcttcccgtccagttcgaaatagtccgggcattcccacatatagccaaaagcttccggtgtggttattatatgtttaaatttccattctttcagattttctgattcataaaccagaactgcacctttatctcccttaagacgtccgccaagaaccataaaatacctgtcgttttctttccagactttcgggtctctgatatgacaggtaaactcttccggatatttttcaaaagaaattatctcttctttatctccgaaatgaattccgtcctcactttctacatgaagcgtactggtctcacgtccttcattaatataatcataatcaccgtcaatctttacattcccggtgaaaaacaaatgaagtttttcactctctgccaatgcagatccggaatagacaccatgacagtcataaggagaatccggataaagagctgtcccttcgtatttccagtctaccagatcttcgcttgtataatgtccccagaatttcagtccgccttccacatcaaagggagcgtattgaaaaaacacatgatatctgcctttataccagcatagtccatttggatcattgagccatccgaccggcggcatcagatgatgtccaagccggaatcttccttctgtcagatttgcgttcttttcaattacttttatatttctttcaagaactttagttaacgtactcatttcacaatctccaatactttatctgatggtgttaccgaatcttccgacagaattttcacatctttataatcatccgaattcgttacaataagaggagtcgtcacatcgtatcctgctgccttaactttctccatatcaaaggaaaccagaagctggcctttctttacgtgatctccattctttacatgagatgtaaaatattttccattcaattccactgtattgatcccgatatggatcagaagctccataccactttccgtacttaaaccaactgcatgctttgtatcaaaaacagtctcaaccacagcatcacatggagcaacaacttcacccttcgatggaattacggcaattccttttccaagtacttccgaagcaaatgtagcgtcatttacctgggaaagcaaaatcgcagttccttctgatacactataaagcacagaatcatctgcattgcttttttctgttgttgatttatctcccacagcttcaacactttctgtcttttcagaaacattagtgtccttatatccaaacaaccaggtaagtacaaaggcagcaccaaatgcaatcacaaacataagaatataagaaaccggattattcagacaaagaagaattccaaagataccggttacgccagttcccgtagcccccagtcctgtaacagatgcaaacagtgcaccaaatgcaccaccaatacatcccatcacaaatggttttccaaagcgaaggttaacaccaaagatcgcaggttcagtaattcccatacaggcacttaatgcagacggaactgccattgatttaatcttctgatcctttgtcttaagtgctactgcaagagtggctccaccctgtgcaatattcgctgcagaagcaagaggcaaccagtaagtaactccaaatttagacaactgtccaagatcaatgatcgtgtacatatggtgaacaccggcaaccaccgtcggtgcataaaacgcacccataataaaacttccgataccaaatggcaatgcgatcagccactgaatcccattcagaagtccgttctcaacagtaacaaagataggtccgataatggataatgtcagatatcctgttacaaagacacttacaagcggagtaacaaacagatcaaacattgccggcactactttgtgaagtctcttctcaatctgagccagtacccatactgcaatgataaccggaattacatgcccctgatatccgaccatatcaatagagtaaagtccaaaccatactttctgagttgctttaacaccttctgtggcaactgtccatgcattctggagattcggatgaatcatgatcataccgataactgcacccagatacgggtttgcaccaaacactttagcaccgctgtatgcgatgaggattggcaggaacgtatatgccgtattactgaaaagctgtgcaaatgtataaatagaaccgctggtatcaatattcaaaaatccattgtttaccatgaagttcagtgcttccataattcccatcaggaaaccgcttgcaacaattgcaggaataatcggcacaaaaatatctccaagtgtcttgatcagtctctgtaccggatttgccctggaagccgcaacttttttcagctcttctttactgctctcagaaactcctgcaatccggatgaactcatcatatactttattaactacacctgttcccagaatgatttgcatctgtccctgcgcaaagaaaacaccttttacaccttcaatgttctcaacatattccttatcagcctttgaattatcactgataaccaggcgaagacgtgtggcacaatgagctgcggaaataatattttcttttttaccaatatggtcatatatctcctgtgctgtttttctgtaatccataatatcctccttttatggaatcgttctcatataaatgtacactttgaaattctcacatattcaacaaatttcacttgttaatcttataaaaataccttttaaccttaatatcgtcttataccattccaaatttactctgatatctgattataactcagcagatgtcttgcactctcacgatatttcttatctgatcaccaatatgtattttctatggattgtatgtacttttatggaatcgttctcatatatgctattatatctgggcgttttttatttgtaaatatgtaacatatcacaaatattatatccattttttatatattatttccaaaacactccctttaatatatatgtaaatccaattattcagaaaaaaagaactctgatgattgcctcagagttcctctttcatgttcagtcatatatttcggtgagactctctgagtaccaccttacatcccatttttatttctttatgtacagatgttgtttccttagattctatcaaatctaccagcacttttgctgattccattccacttgtcttataaaaaaaatgtacagtagtcagctttggttctatgatctttcccagaaaactgtctcccattccggcaatctgaacctgttgaggaatctgatatccgttctccttcagccaatttgccgctccaactgccatggtatctgttgcacagatcaatgtatctacatcgggatgctccgtaaaaagttctttcgctttctcatatcctgactctaatgtgaaatttccgcattttacacatccactttccaatgtgatctgattttctccaagaaccttctccacacctgattttcgctgcctgccaactgcctcatctttatccgtaactgtaatatatccaaacttctttcctgtcttcaccatctgttcagtaagatttacagcagccttataatcgtcctgaaaaatacatggataaccatccagctgttgtccaagtaaaacaatcggaactttaaatcccttcatcatttccctgtgctgttttgtcaatatggtggcaataaaaataacaccatcgacctgattatccctgaacagcgaaagatatttcaattcttcttcaacactgttatttgtatttgccagtatcagctgatatccttttttggtaagtatgtcactgattccggcaacttcccggctgattgtattggaatctatctttggcagaattactccgaccagttttgtcttcttagtacgcagcctctgcgcctgtgaagaaggctgatacccggtttcttcaataactctgctgatattttttttcttttcctcactgacataaccattgttcagatacctggatacggtagctctggagacccctgccagtttggcaatctcattaatattcatataaaaagctcctctttcatgctgtctgtataatttccgaaagtatttttataaccagcagtattttatgatgctagagcgtgtctgaaaaatgctttccgcaagatgtatgtcacaatttgtgggagattttgcccctaatctgatatccacgaattgttaactgctgaatcactacatattttgtattatactacacatatcatttctgttgcaaatatcaaagtactgtttatacgttactgttttggccctataccaaattaagggctgccgatctacggcagccctgtttttttcttctatttcattatggaagatattcaatcggatctattggttctccatcctttttcattgcaaaataaagattggttccttctgtgctgtaatattttgtaggctgtgcaatatatcctatcgtcgttccctttttaattgtatctccttctgacactgtcagatctgtaagctgtccataaacagcctgatatccatttccaagttccattgtcagtgtagtacccgtctgcgcattctgctctatagaataaaccttgccattaacagcagctaccacaggtgctccctctactgcaccgacagcaatagccggactcaatttatactgatcaagcgtcggaaaataagtagtctgatccatactgtaatcaaggagaacatttccattcaccggccactccattaatgtatcttccgaaaaatttactgtcgcaagattcagggccgatgccgaaacatctgttgcttcatctgcctgatcttctgatatcgtctgggatttcatatttgcatttactgatgattcttctgcttgctgagaatttacagcattgtcagtcttatccacatctgcagtattatctgattcattattatccacagtattctgagctgtttccccatacattccttgtttttggaatgtaacctttgtatcatccaaatcttccccgtcatcggatatccactgattttctgactccacatgattcgttcctgcatcttcactcaattgttcttccgtatcctgtgtactttcaccgacattttctgttttttcttcaggagttttctctttgaccggggaggtacctaactgataaactgtaattcccaatgctgctacagcggccagtccaacggaattggcaatgattcttgtcactttgttattcatcatattcctttcacctctgttttcatcttcatatctatagggtgtccagaatattcgtatctattcagcaatttacagattttatgttcagcacatccatctcaggaaaataatattgtaagatctcttttgcattcgcagactcctttgccatctcattccctccatattgtgagaatcctaatccatgaccttttcctctacataaaaatcgtatttcctttccagacttctgaattgtaaaatttgaggacgtgagtcccattccttttctgaatgcctcgccttccaacactttcccgtcagccagaatttctgtaacataaccggcactgtccctggattttatttcaattctttccggaaggacatttttatttatgtatacactattcaaataatcttttgcatttttatccacaagactgtgtacggatctgagatacgaatcatcttcgttgtggaaaacttccattccatctcttgtctgtcctgcacttaattcatgatagggaactaactttaattctttattccatacaatgacttttccttctgtttctgttactgctttttcgtacttattctgtaaaattacacaagccagagatttcccctccatctcttcctttatctgacataaagttattgccagatttttctcctctttcattgtccggtaaaaatttgatcttgctatgattgtttgtgcttttatagtctcaagttcatatttgtcttcaatctgcgatgaaacgatcaccggcagaagcatttccacattaaattttttattgatcaatgtagtgttggcaccattaaaaataattgtaactatatagggaacaaaaaacagagcaaagattcccgttgttccagggaaaaaagactttctcatatcagaccatcattataaacttcttctttttagtatatacatatatatttatctgtatgtatattatttataacacttctgttatatagcaattctcgtaaataatgcatattgatcctgctcatcagaacataaaatcctgctgaactgtctcaaattcattaattgagaggactgcgatagtttctgcatacggggcttcattaccccgtattaaaatatacagctctatttattctattctggattcgtggttcattccagtaaatgattttattttttctgttgttctttttatcatccggacgcaaaacagttctgtcttttttagaatctgtatcttttatgcagattcttttcttgtcttcaatgactcccattacaaagcaaataagagcagtcatgattaactgaaaatattttttcagattctttaaaggactcttcataaaaactcctcctgttctgcattacatctactgacttcaaacagcctgtccaccgttaagactgcgcacttcctacggttaatggtatcaggtactaataatatatgaaaaaacataaaactttagaacttttttatttctctatagtaattccataaaatgatgttagggttaaaaaaacacaaaaaaacttctgtgagaatatcacagaagttttaaagtgaagcatcggggattcgaaccccggacaacttgattaaaagtcaagtgctctaccgactgagctaatgctccatattatttaattatcactttcaaagcgaatgcccagagccggaatcgaaccagcgacacgaggattttcagtcctctgctctaccaactgagctatctgggcaaaatagcggggacaggatttgaacctatgaccttcgggttatgagcccgacgagcttccagactgctccaccccgcgatattaatttttaaaatcaaaagccgatgatcggactcgaaccgataacctgctgattacaaatcagctgctctgccaattgagccacatcggcttagctgttaagctaagtggatggagaaggattcgaaccttcgaaagcgttgctaacagatttacagtctgccccctttggccactcgggaatccatccaagtatggaacctatagggctcgaacctatgaccctctgcttgtaaggcagatgctctcccagctgagctaagattccatatccatatgcaatttaccaaactcgtcagctcattgctaacgacccagaagagactcgaactctcgaccttcgccgtgacagggcgacgctctaaccaactgagccactgggccatttaaaggtttgcaccttcaaaactacatacatgttgacatttccttgagattcattcttcctgcgattcttggtcaagccctcacccgattagtaacagtcagctccatgtgttgccacacttccacctctgccctatctacctcgtcgtcttcaagggggtttacttctttcgaatgggatatctcatcttaaggggggcttcacgcttagatgccttcagcgtttatcccttccgggcttggctactcggccgtagacttggcagtctaaccgatgcaccagcggcccgtccatcccggtcctctcgtactaaggacagctcctctcagatatcctacgcccacgccggatagggaccgaactgtctcacgacgttctgaacccagctcgcgtaccgctttaatgggcgaacagcccaacccttgggacctactacagccccaggatgcgatgagccgacatcgaggtgccaaaccactccgtcgatgtgaactcttgggagtgataagcctgttatccccagggtagcttttatccgttgagcgatggcattcccacttaataccaccggatcactaagccctactttcgtacctgctccacccgtcggtgtcgcagtcaagctcccttctgcctttgcactcttcgaatggtttccgtccattctgagggaacctttgggcgcctccgataccctttcggaggcgaccgccccagtcaaactccccgtctggcattgtcccaccgccgggtcacggcggctggttagaaacccaatactgcaagggtggtatcccaacagcggctccatggcaactggcgttaccatctcctagcctcccacctatcctgtacatgcaataccgagtcccagtaccagactggagtaaagctccatggggtctttccgtcctggcgcaggtaaccagcatcttcactggtacttcaatttcaccggatgcattgtcgagacagcgctcaaatcattacgcctttcgtgcgggtcggaacttacccgacaaggaatttcgctaccttaggaccgttatagttacggccgccgtttactggggcttaaattcaaagcttcgcgttaccgctaacctctcctcttaaccttccagcaccgggcaggcgtcagcccatatacctcacctttcggtttcgcatagacctgtgtttttgctaaacagttgcttgagcctattctctgcggcctggtttcccaggcaccccttatccctaagttacggggccattttgccgagttccttgacaatgcttcttccgccggccttaggattctctcctcatccacctgtgtcggtttacggtacgggtacggtataaacaatagcggcttttcttgacgcatggctcacggacttcgctactttatttcgctccgcatcacggcttcccattgccacccggatttgccaaagtgactggtaccccgcttgcaccgggctctccattcccggcttccgctttccttacgtgtccccacagttctgtcataccgcagtacaggaatctccacctgttgtccatcggctacgactctcgtcctcgccttaggccccgacttacccagagcagatcagctttactctggaaaccttggatattcggccataaggattctcaccttattctcgctactcattccggcattctctcttccatgcagtccacagctcctttcggtactgcttcttcccgcatgcaatgctcctctaccaacctttcggttccttagtttcggtggcgcgtttcagccccggacattttcggcgcaggacctctcgaccagtgagctattacgcactctttgaatggatggctgcttctgagccaacatcctggttgtcttcgaaatcccacatccttttccacttaacgcgcacttggggaccttaactgaaggtctgggctctttcccttttgaccgcccaacttatctcgtgcagtctgactcccgataatcgattacgcggcattcggagtttgatattcttcggtaggctttgacgccccctaggaaattcagtgctctacctccgcaaatctgtatcgaggctagccctaaagctatttcgaggagaaccagctatctccgggttcgattggaatttctcccctatccacacctcatccccacccttttcaacggatgtgggttcggtcctccactacctcttacggcagcttcaacctggacatggatagatcacccggtttcgggtctactcctactgacttaaggccctattaagacttggtttccctacggctccacacctgaagtgcttaaccttgccagtaagcgtaactcgccggaccgttctacaaaaagtacgcggtcgcacatataaagtgcttccacagcttgtagacacagggtttcaggttctctttcactcccctcccggggtccttttcacctttccttcacagtactatgcgctatcggtcactaagtagtatttagccttagggggtggtccccctgatttcccacaaggttccacgtgtctcgtggtactctggatcctgctcagtctcatcagctttcacgtacggggctttcaccctctccggccggctttcccaaaaccgttctgttagcttcaaagaatcttaaatgcagtccgtaaccccggaatgcacgcattccggtttaggctcctccgcgttcgctcgccgctacttacggaatcgagttttctttcttttcctccgggtacttagatgtttcagttccccgggttcccttccatacgttatggattggcgtatggatacatgaggtttgctcatgtgggtttccccattcagacatctccggatcacgggatatttgctcctccccgaagcttatcgcagcttatcacgtctttcatcggctcttagtgccaaggcatccgccctgtgcccttattgcttgacctttcgcttcatcaccctagcgtaggtgatgcggtcgtttgattctcattgtttttgataactttgttatcgatgtcttcctatcttgcgttttatgagatactctcatatctcttaacgttttgtatcaaggatatttgattaacttttaatcaaatttcatgtatgcagttttcaaggtacaatttatatcaggcttaacacttaacctcacggctaaatttttataagccaatgggcttaagtggactcgaaccaccgacctcacgcttatcaggcgtgcgctctaaccagctgagctataagcccatcttgaaatctttcgatttcagtggagatgaagagattcgaactctcgaccccctgcttgcaaggcaggtgctctcccaactgagctacatccccatttgatctggcagccacctgctctcccacaccgtctccagtgcagtaccatcggccgcttaggtcttaaccgtcgtgttcgggatgggaacgggtgtgtcccctaagcgcatcactaccagaaatgttgttattcagttttccttgataactcaacagtaaaacacattctactctacttcttcttccttagaaaggaggtgatccagccgcaccttccgatacggctaccttgttacgacttcaccccagtcatcggtcccgccttcggcagctccttctttgcagttaggtcactgacttcgggcgttactgactcccatggtgtgacgggcggtgtgtacaagacccgggaacgtattcaccgcggcattctgatccgcgattactagcgattccagcttcgtgtagtcgggttgcagactacagtccgaactgggacgttatttttgggatttgctccatctcacgatctcgcttccctttgtttacgccattgtagcacgtgtgtagcccaaatcataaggggcatgatgatttgacgtcatccccgccttcctccaggttatccctggcagtctccccagagtgcccaccttaaatgctggctactgaggataggggttgcgctcgttgcgggacttaacccaacatctcacgacacgagctgacgacaaccatgcaccacctgtctcgcctgtcccgaaggaaaaatccggttaaggatcggtcaggcggatgtcaagacttggtaaggttcttcgcgttgcttcgaattaaaccacatgctccaccgcttgtgcgggtccccgtcaattcctttgagtttcattcttgcgaacgtactccccaggtggaatacttactgcgtttgcgacggcaccgaatggctttgccacccgacacctagtattcatcgtttacggcgtggactaccagggtatctaatcctgtttgctccccacgctttcgagcctcaacgtcagttaccgtccagtaagccgccttcgccactggtgttcctcctaatatctacgcatttcaccgctacactaggaattccgcttacccctccggcactcaagtatgacagtttccaatgcagtccacaggttgagcccatgcctttcacatcagacttgccacaccgtctacgctccctttacacccagtaaatccggataacgcttgccccctacgtattaccgcggctgctggcacgtagttagccggggcttcttagtcaggtaccgtcactatcttccctgctgatagaagtttacataccgagatacttcttccttcacgcggcgtcgctgcatcagggtttcccccattgtgcaatattccccactgctgcctcccgtaggagtctgggccgtgtctcagtcccaatgtggccgttcaccctctcaggccggctatggatcgtcgccttggtgggccgttaccccaccaacaagctaatccaacgcgggtccatcttataccaccggagtttttcacactgagccatgcagctctgtgcgcttatgcggtattagcagccatttctgactgttatccccctgtataaggcaggttacccacgcgttactcacccgtccgccactagaattaaattaaatcgaccgaagtttcaataaagtaattcccgttcgacttgcatgtgttaagcacgccgccagcgttcatcctgagccaggatcaaactctctgataaaatgtttgattcactcaagataacaactagctatctctcgttttactgtttttggtttttcaaaccgttcttaaaaatgtaaagaattttcgagaatcgtatgtgtttcactgtttagttatcaaggttgtctgtcttgcgacagcttatttattttatcatgttgtttttgatttgtcaagaacttttttaagttttttcaaatctttttttcaaccgatttactgtttgttgacagcttgtttactttatcatagtttcaagtgtttgtcaacatctttttttatttattttttgttttccaaaaaataaaaacggagaaggagggatttgaaccctcgcgccgcgttagcgacctatacccttagcaggggcacctcttcggcctcttgagtacttctccagactccgaactaatagttcaatattaaattcgaatgcactttggaatctcccgaagcgcatttgtaattatatgtaaaaaaacctgttttgtcaacaggtttttttactttttttcatattttttatttttaccctaaaatccggtttcaggacttgcaaatttcatacttccatcaagaagtatactgtgttattgtcgcttcgatacgtttttttacctctgctgcaatctctgttgttttcatatctttatactcatcatagtatatgggttccagaaaatgtacctgcactgtaagttttttgacagatcccgtatcaaacgctttataagaatcaatcagtgctacgggtacgatcggacattttgatttcgttgcagctttaaaacttccacctttaaattcctgcggatgattgccgtctttgcttctggttccctcggcaaaaatcagatagtttcttcctgcctttacttctttgataacattaatgattacctgcatagattgtttgacatcatcacggtcaatcataaacgctttcatgcatgcaaatacctgcttcagaaatggtacgtttgtcagctctttttttgccactaccgagaaaggtaccggacacacctgtatgattgcaagtacatcaaataatccctgatgattgggaaagaaaataaacccattttcttttggaatattttccataccatgaccgtcaattaccagattaccgcctttcactgctctgttatctacatatttaagaagctgatatctctgttcttcactgtaacgttctgcatgcgatgcataccagcataacttaaaccatccatatggaacaaaaaagagatttctaaataccatcagtaatattcttttcatttttttgccctcgatatattacactcctgctttttccgaaattttgtcttcatatcccggatttttcttgataaatgtttcatatgctttggtatacgtcttgtaagcatctgtcttcataaattggacatatgctgtagccgcctgagttttcatatcatctgtgatctgtgatggtgccatgatataataagttttatcctgtttaccaaccatataagtttcaacacatggatattcctgatcatcctccaggatcagattgtaggttatgtatacataactgtacttgtcattttcagaaaggatctcacaatcctgaacagatactttcttaggattatgtgccgcaaaatatttgagtgttgctgtaatctctgtctgaagatctgcttctgtattatctgcctggttatagcactccttcactttcttttctttcccgtcagtataggactgaatcaattcctctgttactttttccggtgatttatgactcactcccccgcatcctgccacacagagtgtcagtaataccaacactccggctgcaagatatctgtaccatttcttcatggttattcctcttcccctctgttctcatcctgtgtctcctgatctgtcggctgatcagattcttctgtttctgcactgtccgtaatttccactgctgcctgctgtgcatttgtatctttttcttctttatctctcactttagctacactggctacagtgacaccctctgtaagattgatcagttttacacccgatgtaattcttccaagaatggaaatatcagcgcaggcgattctgatgataataccttccgtagtgatcagcattacttcattatcttcatttacagctcttgctccgattacatcaccggttttctcggtaatcttataacattttacacctttaccgccacgattctgacaggtaaattcgcccatagaagtacgtttacccataccatttgcagaaactatcagcagacaatctccctgagaattcagctgcattgctaccacttcgtctccatcatcgatattcataccgcgtacgcccatagaagttctgcctgtacttcttacatctgtttctttaaaacggatacacataccatcttttgtaacaagtattatatccttcttatcatctgtaagcttaacctcgatcagttcatcatcatcacgcaatgtgatagctgccagtccgtttttacgcacattcgcatattctttaatcggtgttttctttaccaggccattcttcgtagccatcatcagataatgaccatcttcaaatttgcggagcgggattactgcagtgatgcattcccccggcataagctgtaacagattaataatcgcagttcctcttgcagtacgtcctgcctccggaatctcatatgccttcagacgatatacccttcctgtatttgtaaagaacatcagataatgatgggtagttgtcatcagaagttcttcaatgtagtcatcctcaagagtctgcattcccttaattcctcttccacctctgttctggcttctgaaattatctactgtcattctcttaatatatccaagtttggtcattgtgatcactgtattctctctcggaatcagatcctctgtagaaatatcgtatacatcatatccgatagaagtctttctgtcgtctccgtatttctctgcaattgcaagaatttcttcccgaatcacgcgaagaagaagacttctgtccgcaaggatagcctcgtatttacggattttttccattaaatcagcatactctgcttccagcttctctctttccagacctgtcagagcacgcagacgcatatctacgattgcctgtgcctgaacatctgtcagttcaaagcgatccattaactcctgttttgcgatctgcacattctgcgaagctctgataatacggatcacctcatcaatattgtccagtgctttcagcagaccttctaaaatgtgagctcgctctcttgctttattcaggtcatatttcgttcttctggtcactacatcttcctgatgagccagataatattccagcatctgtttcaggtttaataccttcggttccagacttccgttattcggaataagtgaaagcatatttacgccaaaagtatcctgtaactgcgtatgcttatacagtaaattcaaaactacatttgcatttgcatccttgcgcagatcaatacagattctcattccctcacgactggaatggtcattcaggtctgtgattccgtcaatctttttatctcttacaagttctgcaatctttgagatcagacgcgctttatttaccagatacggaagctctgtgacaataattctggactttccgtttggaagagtctcaatatttgtcactgcacgtacacgaatcttaccacgacctgttctgtatgcttcttcaatccctcttcttccaagaatcgtcgcacctgtaggaaaatcaggaccttttacaatatccagaatctcttccatagtcgtttcgcgttgttcttcaatgatattgtctataatcttgacaacagcatccacaacctctctcagattatgaggagggatattggtagccatacctactgcaatacctgaagttccgttcaccagaagattcggataacgggacggcagtacaaccggctctctctctgtttcatcaaagtttggctggaagtcaacagtatctttgttaatatctgccagcatttccatggaaatcttactcagacgtgcctcagtgtatcgcatggccgctgccccgtcaccatctacggaaccaaagtttccatgtccgtctaccagcggatatctggtagaccattcctgtgccatatttacaagtgctccataaatagaactgtcaccatgtggatgatatttacccattgtatcaccgacaatacgcgcacatttacgatgcggtttgtcaggaccattattcagttctatcatggaatacaatacacgtcgctgaaccggtttcagaccatctcttacatcaggcagtgctctggaagcgataacgctcatggcatagtcaatataagagtccttcatggtcttttccagatccacctcgtggactttgtcaaaaatattatcttccatttatctattctccctattatcagatatccagattctttacaaatcttgcattctcttcaataaattcacgtctcggctctaccttgtcacccatcagtgtagtaaatgtaaggtcaatctcagaagtcgcagcctcatccatggtaaccttaagcaggattcgtttctcaggatccattgtcgtctcccaaagctggtctgcatccatctctccaagacctttataacgctggatcttgttatttccgtcacgtccgatttctgtcagaatctgattcagttcatcatcgtcgtatgcataccatactttcttgttcttctccaccttgtataatggcggctgtgcaagatacacatatccctgtttgataagctcaggcataaaacgatacaggaaagtcagcagaagggttgcgatgtgcgcaccatcgacatcggcatcagtcataataataatcttatgataacgaagtttactgatatcaaaatcttcatgaatccctgttccgaaagctgtgatcatagctttgatctctgcatttgcataaatcttatccagacgtgctttctctacattcaggatcttacctctcagtggaaggatagcctgtgttacacgatttctggctgtttttgcagagccaccggcggaatctccctctacaatgtagatttcacagttctcaggattcttatctgaacagtctgcaagctttccaggaagtgacatattatcaagtgctgattttcttctggtcagatcacgagccttacgtgcagcctcacgtgctctctgtgcaagaactgatttctctactgtagttttcgctactgttggattctgctcaaggaaaatctcaagctgcttgctcaccacgctgtcaacagcccctcttgcttcactgtttccaagcttctgttttgtctgaccttcaaactggggattctcaatcttaacactgacgattgcagtcagaccttcgcggatatcatcgccactcaaattgggttcactgtctttaagcagcttgttctttctggcataatcattgaacgtctttgtcagggcatttctgaaacctacaatatgagtaccaccctcaggtgtattaatattatttacaaatccatagcagttctctgtataagagtcattgtgctgcatggcaacctctacagacacaccgttctgctgtccttcgcagtaaatgatttccgggtaaagcgcttccttgcttctgttcagatagcttacaaattcacggataccaccttcataatggaaaactttctctctttccattccttctctggtatctttaagagaaatcttcaatccctttgtcaggaatgccatctctctcaaacgctgtttcagaatgtcataatcatatactgtttcctcaaatatttctttatccggaaggaagacaactgttgttccggtcttatccggttggcagtctcccacaaccttcagaggatacatagttttaccgcgttcatatctctgctgataaatcttaccttcatgatagatccttacttcaagccatgtggaaagtgcatttactacagacgcacctactccgtgaagaccaccggataccttgtaccctccgcctccaaatttaccgccggcatgaagaatggtaaatactacttctacagcaggaatccctgctttatgattgattcctaccggaataccacgtccgttatctacaactgtgatagagttgtccggattaataactacctgaatctctgtacaaaatcctgccagtgcttcatcaaccgcgttatctacaatctcataaaccagatgatgaagacctctgccggatgtacttccgatatacatacctggtctctttcgtacggcttccaaaccttccagaatctggatttgatccgctccgtattctgtattttctccgcccatttctttcctcctgttatatatacttatcaccagaatatatctgaaaacccctgcgtgaaaattatagacaggttttcaaatatattctggtatctggacataataatacaaatttattatagcacaaaagcccgttccttgccacagcctgaataaaaaagaatccccgaaaacgggaattcttctgtatgttaatcttattcttcggttttattgatgaggtactgatagacatctctcttcgtcattcctctgtcatttgctaccattttcatagcttcttttcttgaatgtccctgattttcatagatttccatgtgttcttctatggtaattttttcccaggatgccttctgttcctcttccatctcctgtctgcttctgccttcgatcacaagcacacactctccaagcggcttctctgtctgataatagaggatcagctcctcgatagtcgtatggaatgcagtctcatgtcttttcgtcagttccctgcaaagagtcattctgcgatttccgagagtttccttcaattcctccagagttcttaccagtctgtgaggagcctcatagagaatgatagttctcgtttcattcttcagttcttccagaatcagttttctttcttttttatctgccggaagaaatgcttcaaaagcgaatcttctggttggaagtccggacagagtcagggcagtgatacaggcagcaggtcccggaagagaagttacttcaatccccgcttcataacacattgccgcaagctcctctcccggatctgagatccccggagttcccgcatctgtgatcagtgcaatattctgcccttcctgcattttactgatcagaacatatgccttatcaattttgttgtactcatgataactggtcataggtgtttttatatcaaaatggttcagcagtttaatactgtttctggtatcctctgctgcaataagatccacttctttcaatgttcgaagtacccggagtgtaatatcctccagatttcctatgggtgttgcacataaatacaatttaccactcataatttgtttcctctcatattactttgcaaataaaattcggttaaatcatatcataaatcttcagtatattttctgtatagactcccggctctttatatacgatcagaggaggttccactgtaactctggaatttcctccctttaatgcctcgatcagaaccatgtttggttctctgtctatgtatggatatacaagctgcatccttttcggttccagacgatactttgtgagaacattcataatctcagccagtctgaacggtctgtgaaccatataaaatcttccacgttctttcagaacctttgatgcctggctcaccacatcctccagattacagagtacttcatgtctggcaattgcttttggcatatccggattgcgaagtccatgctgtccgatcatataaggcggattacttgtcactacatcaaaagaagctgccccaaaaatatcagcagcctccttaatatcaccctgtacgatctcaacatcgtcctccagatgattatatctgacactgcgtccggccatatctgcacactctttctgaatctcaagacctgtaaagtgtttcccatttgttttggttttaagcaggatcgggataattcccgttcctgttcccagatccagagcagtctcacccttttttacttttgcaaagccggaaagaagaactgcatccatcccaaaacagaatttatccggatcctgtatcacataatatccgttctgaagatcatctatacgttcattatcttttaccagctgatcagtcatttaatttggaatctccttttttatcttccagatttccaagttcttttaattctttttcagagactttgactttcttctttctcggtctgaatttcaggtcatctaccggaaaatcctgaatttctttctcgtcattgatctctacaattacctttacacgttgacgaagcacgtttacactgtgtacagttccggtaagcccatccggagttgtaactgtatctcccagtcccggaagctttttattcagctcttcatatgtttcctgctcgttcttcaggcagcacatcagtcttccgcacacaccggaaatctttgtctggttaagggacagattctgctcttttgccatctttatggataccggtgcaaactcagacagatatgtgtgacagcacagacatcttccgcagataccgattcctcccagaatctttgtctcatcgcgaacaccaatctgacgaagttcgatacgcgttttaaaaattgctgccagatcttttaccaattggcgaaaatcaattctgccgtcagcagtgaaataaaacagcactttattattatcaaatgtatactctgcatctatcagtttcatttccagaccatgttcacgaatcttcttctgacagattttaaatgcctctctctctctgactctgttctgtgcctctctctcgtcgtcctcctttgttgccacacgaagaacttctttgagagggtgaacaacatcttcctcacctacttctcttggtgcaagtacgactttcccgtattcaattccccgggctgtctccacgatcacgtgatcgcctgttttaatttcataatctttcggactgaaataataaatcttgcctacattacgaaatctcacgcctactacttttgtcattctatttctccctgatcgtcaggaacagcaattcaaatgccagatcaaaattaacatttgctttcagacgtacctttgtcttctgaatagaatccagaatgttctccagattctcgtaggaacgctgctttgcctgttctctgataaaattaatttcctgtttaaataccagattgtcaatctcctgtgttgccttaaacatcaggacatctctgaaccagaactggaaaatatccagataatcgttgatattctgtttgtcctcagaaagactcttaatcgcatctgacagttcataaacttccatggtgtttgcatatttaagaatcctcagtgcattctgagtcatctctgcaaactcctgagaagtagctgcttcttttgcccttccaatactgccctgtgcaaaggatgcgtcaatctccgcctggtaatccggaacatgaagatgctccatcagatatttctttacaagaccgtcatccactaccttcagatcaagacgaacacatcttgactgaatagtcggcagcagtcccccgatattattagtcagcaagagaatcactgcatatgccggcggctcttcaattgttttaagaagagcattctgtgcctgtggtgtcataagatctgcatctgcaataatataaatcttgtaaggactgtaatatggtctgatatctatatcattgatcacctgatccctgatctcgtcaattgtgatcgttccaggtttctcatgactgaccataataatgtccggatgattcttacccatcgcctttttgcaggaatcgcatttctggcagggttctgtacctccggcctcacactgaagtgttgccgcaaaagtccctgcaaggagcttcttaccagaacctggttcgccggtaaaaatataagaatgcgatatttttcctgattctattgcattttttaaatgtccgataatctcttcgtgtccgataatattgttaaatcccatcataagaatcacctcaccagtccgttttgtaagatattataccataaaagaagaactattgcacagactttatataatttgcgatttctttcacacagtcatcaagatttatattctgaaaacgtttctctatccctgcgttcagaatattttcctctgaaaaatccgactgatctgcaataaatcttctacacatttcctcatatcttggattttcctgttctctctctctattaagagcacgactcagtctttctccatcttctacctggacataaacaggacagactgcatcttccccatagtatttacgcatctttttaaatgactccagagtaccgattcccagataatcggaatctgcaaggttcacctgaccatcatctgcagtgaaataagtccatatcccataaaccgtatgatatgctctctcctcgataagatttccgttttttctgaattcttccagttttccgtcatctacaaaataataattttttccatcctgctctcctgccctgatcgggcgggttgtatacagaataagtgttttcagattcaattctttatgtgcggccagaagtgaatagattctgtcttttccggatgcactctttcccatgatgtaaaaaatctttcccatatctgttgtgttattcctttgccggactgtattcttcctgtccaatttcatttcgggcagctacgcagattgtttcagcagatgtatcactgagtccctgtacttccagcccctgttccatgtatcttctcacatttcttacaaattgtccagttatctgctctcccggcacaataatcggaattccgggcggatacagataagcaaactctgcactgactttgccaacactttctttcagagaatatcgcctttgctgtgcatccactgcctgagaaattgtcataagctgtgtcattctcgcatgagaagtatgatactgcgattcctccgactcatctgtttgctgtatctctgcatcaatctcttcaattgcagtacacagtctctcaaatccctcttctgtatctcccactgctgcaattccaagaacatatttctcagccgccatttccatttcaatgtgatatctgtcacgaagtatctgatggagaaggtgtccgttaacagaagttccgactgtggagaacaacagcttggatctgtcaaaatcatagattccactgccttcgatcatagaaccttcgatcagttttattttttcacactttgaaagacgctgtctggccttctccaaattgaaggtaaattcgcgaaacatttgctgcccgtcttttctcagtttatccatacatgcatccatactcgccatcagaatatacgacggactgctggtctggtaaatccccataaatctctttatcttttccacatctgccatatcactgcatatatgaagcaccgccgtctgagtcatagatggcagcgttttatggaaactctgtattacaatgtcagctcccagatcagcagcagacaccggaaaatatttagaataatgaagatgtgcaccatgtgcttcatccacaataagaggaatcttatgtctgtgtacaacttctgcaattgtctttatatcagacacaacgccgtcatatgtaggcgaagtaagcagaaaagcctgcacatccgtattttcttccagatatctttccacacgttcaggagaaattcctccgtttatccccagtctctgatcttcatgtggataaatatagaccggctgaagctcacgtaaatacaatgcatggtaaacagccttgtgacagttcctcgcgacaagtatcttcccacctttatttacacttgcactgactgctgccagaagagccgccgtacttccatttacactgaagaaacatttctttgtcccataaatctgagctgcatattcctgtgcttctttcaaaattccttccgcatgatgaagattgtcaaatcctgaaatctctgtaatatctctctcaaaaagaaaatcatctgctgaagatgcccggtttctcttatgccccggcatgtgaaacggataatagtcagactgcccatagctttctaattttttatataatctttccatttttttcctttttatactattgtgccaacaagttgatttctcgaacaatcttgcgttccaaatttcccactgattattgccttttcgtgcctgaaatatggaacttccctgattcagttaaactttaaatctgtatcctacgccccagattgtttcaatatactgaggttttgcagtattaaattcaattttctcccggatcttcttgatatggacagtgactgttgcaatatctcccacagattccatatcccagatttcccggaacaactcttccttggtaaacactctgttcggattctctgcaaggaaggtaagcagatcatattccttggaagtaaatgttttctcctctccgtttacccatacgcggcgtgcagtcttatcaatcttgatcccgcggatctccacaatatcatttttgcgtacattggaaccgatcagacgattatatctgtccatatgtgccttgactctggctaccagttcacttggactgaatggttttgtcatgtaatcatctgcccccagtcccagacctctgattttatctatgtcatctttctttgcagataccatgatgataggagtatttttttcctgtcttacctgcctgcagatatcaaagccatccacttccggaagcatcagatccagaataatcaggtcaaactcctcattcagcgcacgcgtcagtccggtgtctcctctgttgcagatttcaacttcaaatccggaaagctccagataatccttctccagatctgcaattgcctcttcatcttctataattaaaattctgctcatttcattggtacctcctgatactttctaagtacaaaatacatgattgtgccgattccaagcctgctggttgcccagacctttcctccatgatcctccaggatcttttttacaatggaaagaccgattccgcttcctcccttggatgaatttctcgacacgtctgttctgtaaaaacgatcaaaaatagacggcagatcctttgctgcaattccctttccattatcttcaatttcaacctgaataaaatctcccacatcctttatgcgaatctggatgatacctttgggtttatccatatatttgatagcattgctgataatgttatgaataacacgccgaatctgttctccatctgcgatcacctgcacattatcctcaacataattggcatataccagttcaattcctctcgtttccagttccaatcctacttcttctgcgcaatcactgaaataatcttctacattcagtttactgaaagtatatggaattctgttggtatcaatctttgaataaaaagtcagttcattgatcagatgatccatctcattcgtcttattataaatagtcttcacataacggtctattttctccggcgtatccgctacgccgtccataatcccctctacatatccctttaccgctgtgattggcgtcttaagatcatgagaaatattgctgataagttctttattttctttatccataagaactttctcttctgctgattccttcagccgctttctcatctcctcaaaatcccggcaaagttccgaaaactcatcgtcaccatctacttccagaacaaaatcaagatttccctccttgatattctgagtggctttctttaatttaaccagcggtgtggcaatacttctgtaaatccataatccaatagataaagctgtgaatactaatattaccgtcgcagtaaacagcagatcttttgcaataattcttacctgtgtctggctgtgggtggattcccctactgaaatatcatacaccacttccgaggaatcctttgtctgctgtgcaaactttgtatgacctaatccgtacaaagttgccgaaaataaaagcagaggaaccagaatactcataccgaatccaactataatccttgtttttaacttcatcccgatcatcctttatctgttgatttataaggtttctataattttgccctctgcaagcattatatcataaagtctgttttacatatctaaattttctataaaaagaacaggaatcatctgtcctgttctttcagataattcctgttttatcccattgcactgcaatttttgtgatattctgtaattattcagcattccactgtctgtgcaagtactgaacagttacgattttcttatttaagcaaggtattttttaaggtcatcaactttatccagatgctcccatggaaggtctacatccgtacgtccgaaatgtccataagcagctgtctgtctgtaaatcggtcttctcagatcaagcatcttgataattcccgccgggcgaaggtcaaagttctcacgaatgatctcaaccagctttgtatcagaaagtttaccggttccgaatgtttctacgtggatagatgtcggatgagcaacaccgatcgcataggaaagctgaatctcacatttatctgcaagacctgctgcaacaatattttttgcaacataacgtgcagcatacgctgcggaacggtctacctttgtacagtctttaccggagaaagcaccgccgccatgacgtccggttccaccgtaagtatcaacgatgatcttacgtccggtaagtccgctgtcaccatgaggtccgccgatcacgaaacgtcctgttgggttgatgaaatattttgtgttctcatctaccatatctgccggaatgatctcatcgaaaacatatttcttaatgtcctcatggatctgctcctgagttacatccggatcatgctgtgtagagcatactactgcatcgatacggcttggttttccggcttcatcatattctacagtaacctgtgtttttccatccggtcttaaatattttaatgtaccgtctttacggatcttcgttaactgacgtgcaagtttgtgtgccatgttgatggcatatggcatatactcttctgtctcattggaagcataaccaaactggataccctggtcacctgctccgatggcatcaatttcatcttcacccatttttgcttcaagagctttatctacgccaagagcgatatcagcagactgttcatcgattgctgtgataactgcacatgtatcagcatcaaatccatattttccacgtgtatatccgatttcacggatagtatctcttacgattttctggatatcaacatatgcatttgttgtaatctcacccataacaagtacaagacctgtagttgtagcagtttcacatgcaacacgactcataggatctttttccataagagcgtcaagaatagcatcggaaatagcatcacacattttatccggatggccttcagttacagattcagaagtaaataaaattttctccattgtgttctccttttttattcatttacaattgtttcccgaccgcagaataacccgcagccatttatgtactgtatcaacagattatttctctccgctgatacttttccgttaacaaaaagaaacagcccgaagtaatcggactgtctgattatctcaacaatcctcttattgttcgatcactcgctcaggttggcaccttcctacacaaacaggggttgccgtggcttcgcagatcctttgtatctccaccactctgaataaaaggctattactaattattaacttgcattaattaagattgctgcataccatacaatatacttaacccttacaaatgtcaagtaattttttggtattttttatcatcccaccctgagacggaatttctggatttctttctcattggatactctctcaatctcagcaccgagagatctcagcttatcttcaaaattctcgtatcctctctggatatatacgatatcatcaacaactgtgattccatctgctgcaagacctgcgatcaccagggctgcacctgcacgcagatccggtgcacttactctcgcacctgtaagcttcttcacaccatcaataattgctgaatttccctcaactttgatgtttgctcccatacgtgaaagttcgtccgcatacttgaatctgttctcaaaaatactctctgttacaatactggttccctctgcaagtgccagagttacagcaatctgtggctgcatatctgtaggatatccgggatatggaagagtctttacatgagtacggtgaagtctctttggtgcacgtacacgaactgcatcatcaaattcctcaacctcacatccaatttcttcaagtttagccgtagttgcttccagatgcttcggaattacattcttaactgttacatctccgcctgttgctgccgcagcaaacataaatgtacctgcctcgatctgatccggaataatagaatactctgtacggtggagcttctccacacctttaatacggatcacatctgtacctgcacctttaatatttgcccccatactgttcaggaagttggcaacgtcaactacatgcggttctcttgcggcattttccaaaatagtacgtcccggagccaatgaggctgccatcataatattgatcgttgcacctacagagacaacgtcaaggaaaatatggcttccatgaagttcatctgctttcgcaacaattgctccatgcatgatatctacatctgcaccaagcgctctgaatcccttcagatgctggtcgatcggacggcttccgatgttgcatccacctggaagcggtacctctgcatgtttatacttaccaagaagtgctcccagcagatagtaggaagctctgatcttcttgatatattcataatcaacacttacatctccaattgtagatccgttaatcttcacagtagatttatcaatacggtctacctgtgctccaataccagcgatcgcttcaagcaatacattgatatcccttacatccggcaaattctctatcagaatcgtctcatcagtcattatggctgctgcaagaatagcaagtgccgcattcttggcaccggcaatctcaacttcaccgactaaagggttgcctccttttataacatactgttccatatcacacctcttatttattttcactccatgagcagaattaatggtcactgttcactctgtttttcgttttctgcgaacatgtaacttctgtttcaaatgcatatatgtttatactaaacgatcatcctattttaaagtcagttgtatattatatcatatatttatcatttgtaaacaaaaattatttaccactgtccttttcccgagctgtaataatcactttccctgctctttgatatgtattatctccagaattgcccgaagactttcatccaaatctttcccctcttcatcaatggtaatatctgcatatttctcgtacagaggtacacgttcctcatacagatctttcaggctctgaccgtcctttaacagaactccgcggcctttcagatttcccagtcttttggataaagattccagtgataatttaagatatataaccttacctatagacttcagatgttccattgcctcatcacagtaaataacacttccgccgggtgcaatgaccgtatctgtcacatgaatgtctgcattaacctgattttcaatttccttaaatttttccggtccgtcctgctctatgatctctgaaagctttcttttctcctgtttctgtatcagaagatccgaatccagaaattcatatctcaatgcttttgcaagaataactcctattgtacttttccctgaaccgggcattcctattaatgtcacattattcatgtttatgtcctttcattttatcatacattgtctgcgtctgcaaattgcggattactgtttcttttttccggattttttcttcttttttttaacgctgtatccaaatgttcccagttttttaccaattcccagatattcaccatgagaatacaccagaggtttcgcatcattcagatgaaatttcttcttctcgtccatatactgcggatcagcatgaactgcaagcacatccgccagaaacatatggtgggaacccaattccagaacctgccttactttgcattcaatactcaccggagattctgcgatcatgggaactttcacaaaatccgccttctctttggtaagcttcatttctttaaatttatcaacatccctgccggaacggactccacagtaatccgttgcatatgccagtttctctgttgtcagatttattacaaattctcccgtctttctgagcatatcataggaaaaacgggatggccgcacagaaatagacaccatcggcggattcgtgcagacagttcctgcccatgcaactgtaataatattgtcattcccctctccgtcagaaacacttaccataactgccggaagtggataaagcatatttcctgctttccaggtttctttttccatttcttattatcctcagctattctgtctgctgccatcagttgtaatcgttctgtccggcctgtgcagcttccataagtgccggaatcagctgtttcttacgtgaaacaacgcctttcagatcaaatacaccatcctttggctccatatggaaagcaatacgtgccatttcctcacttccctcaccataatagagaagctctgtagattcctcaataatattggtaagcataaagaatacgcgggtaacaccatgacggccacactcgctgaccataaacggaaccagacgctctttgatttctgccagctcatcgctgtccatagaactgatctgtccaacaccaaagttgatctcatcctcagcaataaatttcttataatcctgatagaaaatttcttccggtgatttgtctttcaggttacttcctgctttaaacatctcttttgcaaactgctcaatattgattcctgcaataagtgccagcgcacctgcagccatcttgtcagataatgtgcaggtaggtgaacggaacatcagtgtatctgaaataatcgcagcacagagaagccccgcaatactcggtgaaatctcaagtttctgctccccatacatttcatacagaatcgttgctgtacatccgaccggctgatttctgaaagaaatcggtaccatagtttccagagaacccagtttatgatggtcaataatctccacgatttcagctttatcgatattgtcaactgcctgatctttctcattatggtccacaagtgctacttttttcctgtgcatatccagaaaatttcttcgggaaattgttccgatacattttccctttttgttaattacagggaacgcacgatgacggtgtttgatcatctcattctgaatatcatccgtaaaatcctctgtattaaaagtaaccagattatctgttttcataatataccgtacaggaatactctggttgatcagtcttgcgatcgtaaatgtatcatacggagacataataattacaatttctctctcatgagcaagctttatcaccttttcgctgacttcaattcccataccaacgataatacagctaacattctgcgcaatcgcctgaagatgatcctcttctctgtctcccatgattatcaggtcatccggttcaatataggctttgagcatttccggatttgcagttcccaccagaacttttccttttgtaaaatatccatgctcatttccctctactacggtaccagcaattgtctcggcaattcttctgtactgtgtcttcgctcttgacagcagataactgtccgttgtatccatataagtcttagcaatatcaccgattgtgatcagaccttccagctgtccttctctgtctctgatcggaagagatacgatacttttatccatcatcagatcccatgcatttttcagagacatactcttatcagcttccggactcatacggatatccatatcttttatctgtgttccaatgttagacagatatcccggcggctgcatgccgaaacgatttaacacatattctgtctcttcattgatctgtcctgcacgttttggaatgtatttcaccttctgagaagtcctgtttttgatgtccgcataggcaattgctgaacagatggaatccgtatccggattcttgtgacctattacaaatattttttcctgatttctcatacagattctaacctcaattatctaatttaatgtttgcaaaaagtgcgccaagagatgtggaagcctcttcctttgaatctggaagctcgatcacttcctcctcaatttccttagccatcatatctgttgcctctttgatgctcagacttaattttccatctttgacagcagttacttttacctttactttatctccaactgtcagaacttctgatggtttcttaattctcttctcacagatctgtgaaatatgaaccagacctgaaagaccatttcccagatctacgaatgcaccatatggctgtaagctctcaacaacaccttctgttacaagtccgacctgcacattggatatttttgtttttctctcctcttctgctttttctcttaatatttcctttgcagagagaattaatcttcctttttctttatcaatatcgaaaacctgaacctggattggtttgttcagatattcgtttgtatcctccacataattcagggcaagctttgaggcgggaataaatccacgtacaccttctacataggcgatcacgccgccatttacaatgccttttaccaccacatcaattacttcttttgaatcctttaattctttcagcttatcccatgcaagcacatctgctgcttctgttctggacaacagaatatttccatttccatcgtctttactcacaacagtcgcagaaacttcatctcccacattcacctgttcctttaaagaaaatcccggttctctgctgtaatcctctgccggaataatgccttccgcataatacttcaaatctaccacaacttctttttcatctacactgatgacagttcctgtaagaatatccccttcttcaattttcttaaaagaggcttccagttctgtttcgtaatctttcattgattcagccattatctgttttctcctttacctggaataaatgtaactcttctccatctgttacaggatactgaacagttacaaatagagtatattatgtcagctattttcaaacattataacacaatcactttaataatggaaatctgaattttcatacagatagttcacacaaacggatatttatatgttacaataatatcatcaaccaactatagcaaatctataaacaagtcccctgtgagattacaaaaatcaacggggaactgcctgtatcaggaaaggatattattatacatgaattatgattctgtccccttgagggattttaaagaactgaatgactgggagacagttatttttgtctatcagtctgcccttaaacaggtagaaacaaagattgatattctaaacggtgaatttcagcacagacataaatacaatccaatcgaacatgtaaaatccagaatcaaaactccggaaagcattgtaaaaaaactgaaacgacatggatatgaatccagtatcgagaacatggtacgctatgtaaatgacatcgcaggaatccgtatcagctgttcctttacatctgatatctatctgatcgcagatatgatttccaaacaaaatgacctgacgatccttgcaagacgtgattatatgaaaaatcctaaaaagagcggttaccgcagttatcatatgctggttaccacaccggtctttctctccgacagtatcattgataccaaagtagagattcagatccgcacagttgcacaggatttctgggcgactctggagcataagatgcattacaaatttgagggagacggacctgactatatcacaaaagaattaagagaatgtgcgcgatatgtagcagaactggatacccgcatggaagaactcaataatgaaatccagaaatatggaaaattatcagataaaaaataaaaaatccccataaaacgaggagtgccccggcagtggtttaccggggctattattatgaaaaaaatttatgtgtaatgataacacattacaacgtctttcgtaggttctttcgaactatctatatagtagcaatcatttatgaacaaattatgaactcgcagttaacttttcgtttatttgcacaattattttatattttttaatatttttttatagaattaccacatatttatagttcttgttttattttatgcttgtctatcttgtatatctcccataatcttccataactatttcgtcttttcacagttacgatttgagaatgagcagattttactcaaaaagactctttgcaaaatcagccagtttatgcaggattccttttacctcttctttaccaatccccatttcttccagtttatcatatgccttcgtcacagcactcctgagctgttcctcatcaatatcagaatccttgatctgtttaacgatctttatgattctgttctcttcttcctccgaaaggctaactcctgcagtactctccgcagtctggatcagcgatctgatctgatcatctgaaatatcctgttttgctgcctcatttttcacatacataatgatatcaactactttgtccggatctgatacaagagaatcaatctcattatcagaaataatctcctgtacagattccgaagtatctgctgccatcgctggtactgccggtgtcgtacatgtaattgctgccgcaataataagtattcctgctttttttattctcatgatttaattacctccatacttttgccagtcaataataagtctctgtcttttcactgtcagcagattacagacaatgaacagacattttcatttaccggctcattatatcagaaatcttatgccttctgtaaaataaatatcccaatttctctcttcataattccttcgacatttgttcaaatttttttcacatcttaaacacgattttctcataattgcaggatatactaaagccataaaaataataaagccaacgttatttttataaaatttctttttcatatgttgattgccggaagaggcaattaactctccttccttttaaaaaataaatttgaacgtaatataaaaagcatccgcttagccaccggatgctttttatatttatctttttatgaaatttctgtaaatgcatttgccagctgtgcaaactgtgccagtgtcagtgcttctcctctgacactcagggaaagtccacacatccccaacgcctgctcaatctgttctttagaaaatggtatctcctgtgaattcttcagaccattcaccagtgtcttccttctctggttaaaagatgctctgataatacgaaacatcagcttctcattctttacctcaaccggcggtttttcatatcgttccagtctgatcaccgcacttcccactttaggtcttggcataaaacagttgggcggtacatttgccacgatctttggtttcgcataatattgcacagccagtgaaagcgccccgtaatcttttgttccgggtcctacctgcattctgtccgcaacttctttctgtaccataatagtaatagaatcaacaggaacctgattctcaaacaatcccatgatgatcggggtagtaatgtaatatggcagattggcaacaaccttgatcggacgcccctgatttttttccagtgcaagctggcggatgtctactttgaggatgtcgttgttgatgactgtcacattatcccaatctttcagagtgtcgtccagaataggaagcagtgttttatcaatctcaactgctgccacttcccttgctgcttcagccagatactgtgtcatggttccgattcccggtccaatctccaatacaaaatcatcctttgtgatctgtgcagaatctataatcttatccagaacatgagtatcgatcagaaagttctgaccaaaccttttctggaatgcaaaattatacttctgaagcacttctatggtatactttggatctcctagatacggtctgggcataatctttactcctttttctttattacctgtaactgtacaaatacgcattatttagtaaaatctttctcgtacagaacaatatatccatctctgtctatacgtttcttagatacatttcgtttaaatttacggattcctccctgtgattttgcaatcgcagcatctatcagttcttttactgcgccaacattcataggagaatcctctttctggttaattccaatcagattatacagcgcaagcattcccatctgatcaatagcataaccattctcttttgtataaacccttgcaaaattgacaagttcatcattggtaaacacaggaatattgatcattgaagtaaacttctttgcgaatttcggatatctggcaatcagttttcgcataccaatcttctcatcttccacgattactgtaagtccgtctgtattaacttccatggctttgtcaagcatctctactgtttccggtgtcagctgatttgcattttcgatcacaagaaagccacctgccagctttgaaaaaatcttataaatattttttccgttgatctgatctgcaaaaacatatgctacttttgacgcttccagattcagttctttacagattgccggaatcaggcctgagatcagtctggtctttccgcattccttaccgcccatcacaataatatttccagttttagaagtcttgtctgctgcagccatctgtacatcatataaagtatccacaagctgctctttcatacccggaacctttacaaaatatgtaaataactgcttttcatcatctgtaagttctttttctcttggtacgatatcccttggatctgctccattttccggctggatagattctataaaacgttccagctcctcttcttctgtcagaggttgagcttcttccgttccctctgtatcatcttccggattcagatctgtattccccatcggtccatggagaaattcctcttcagctcttctgagatcttcttctgtaacctcatcttcttcttcagcttcttctatttccggctgcaccggtatttcctttttcggttcttcatccggctttggatcagcaacctttatatcttgtatatctccgctgaggaaatccggttcttccagttcctctgaaatatcatgggcttttatttctttatcatcaacatcagtttctgaactttcttcctgtacttcttctgtttttgactcttcttccttcggaatctcaattccctgcgcactggcagcagcaaggatcgtatcctccagattcaactctttcccttccagatcaaaagaatccatattcagtttcgtctcagcaacttcctcaactttcggcggtttgctcagttccatatttttcatggatgccggaatatttaattcaggcatcttaattgcagccatgggttctgcccccggtttttcaggttctgcctccaattccggaacattttcaggttctttctgcgacgcatcactctttatgatttcttccggaatctcatcttccctggtgataccggcctcgttaaccatatccatggattcttccggaaactcttctttctcttcctgagtcttacctccaaagacatccctgatcccctttgaaatcttttcctgaatgccttccatgctgacctgaacttccggctcattgttttctgtcgtttcttccacttcttcagcttcaggctcttcctgcgcttttacttctgtttccgtttttttcttctccagttctttcgcctgctctggtgtaagaagtttcggaacaaactgtttctcaaattttgctttctcagcacctgtcagctcacccattctcatttttagatcataggctttcataacatatttgccttcactgaaccagagaatgatttcattgcataaatccagacatttctgtttttctcctgctttgtaatacagggctgccagttcatatgaccatttctctgtaaattcctgttctttatactcttccaggattctgatctgctcatttaatgaagaattttttgcccttgcaatcttgtactgcagaatatattgtgtactgtcattcgaagccacctgcttatactcttcaaaaaattcttctgcttcattgatatcatccattcgcagagagatctcaatcagacggtaaagaatattttttccaatagatgccttatgatatgcaagaaggaaaatctccttactgtcctcatatcttccgtttgctgcatatatttcaccgacaacacataaggtgcggacatttttgacgcgtctccagtctatgctgtctacaatgttcatggcacctttataatctttgtcctgaaccagcttattaatctcttcaagttttatccgaaattcttctttatccaatgcattcaccaactttccataattacgctcagtgtatcataagcccgtacccttgtcaaaagattgtttcttcttacacaggctgtgatactgttccctgaactacctgaaataccttatttatctgaaactgatgactgataaaatcatccagccctgtacatgttatcaatgtctggatatcactgatactgtccagaagataattctgcctgctgctgtccagctcggacagaacatcatccaaaagcagaaccggtgtgtcttttatttttctctttactatatatatttctgataatttaagtgaaagtgccgctgtcctctgctgtccctgagaaccgtatttcctgatatcaatcccatttgccattacacacaggtcatctctgtgtgggcctgcggatgtcagtctcatcctcatatctctttctctgttggcacaaatggtactttccagtttctctgctgtacagtccggttcataaataacgttcagttcttccaatccccctgtaagattaccatgtatttttcgaaccgtttcatttagttctttaataaattcactgcgcttgtcaataatcttccgtccatattcagccatctgtatatcccagatatccagtgtatctttaagtgaaggctgaacactgagatccttcagcaatttatttctctgatttacaatatggttatatgaagccagatctgtaagatatattttatctaactggcacagttccagatcaagaaatctccttctctcacccggaccattttttataatattcagatcctcaggagaaaaaaacaccagattaactactccgaaaagctcactggccttccggataggaagaccattgatcgcaacgccttttgctttattctttttaagatgcatatcaatcctgtaggaaagctcatctctttttaccatcatcctgatatgagattcatcctttccaaactgaatcatatccttatctctgcttcctttatgcgattttgtagttccgcaaagataaagtgcctccaggatattggtctttccctgagcgttattgccgtaaaatatattcgtcccctgtgccagatcgagttccagagaatcataatttctgaaattttttaactgaacagattcaatatacatttattcacctgatcactttaatttcttttccatcataagaaacgatgtcaccttcataaacctttcggccacgacggtcatctacctctccgtttacttttaccagtccgtcagtgatcacatatttcgcttcaaccccgtcctgaaccatatctgcaagtttcagtaactgccccagttttataaattcatctctgattttaatttcttccattttcatttactccctatcttgcctgattctggttgatatttacaggcagaatcaaatatgtgtaattttcctcgtcatccctgataaaacatggtgcttttggatttacgaggtagatactgattgtttcatcatcgattactttgagtgcatcgatcagaaatcttggattaaagccaataaggatatctttgccctctttatcaatatcaatattttcattcatggaacccattgcagaatcaatacgtaattccatagaattatctgtaatttcaataatgatcggtttcttttctccctctcttaccaacagagtggctctgtcgatacagtccagaaattcttttttattaattttaattttggtttcgtaatcgctggaaagcatctgatcaatacggaaatattctccgtcgattaatctggaaacaacaatagtctggtcaaactcaaataaaatatgattttttgagaaataaatatttacaatatcatcaatttcaccggataaaatcttactgatctcattaagtgttttgccaggtaccaccactttgcggtcagcataatcttttttcagttccatacgtctgattgcaatacgatgtccatcgagagatactattttcaggtagttatttttgatttcaaaaagttcacctgtcatcagcttattggtttcattggaggcaattgagaaaatagtctgtctaatcatctcttttaatgtgaattgagagatagtaagactttcttctttctcaatcagtgggagatatgcaaaatcttctccggatttaccaggtatcgtgaattttgctttctcacaggtaatggtggcagtaagtttctcatctgttttaatagttaccgtattgtctggcagtcgacgaatgatttcatagaaaatttttgcatccagcgcaatgattcctttttcttcaatgattccatcaacaattgtttctataccgagttccatatcattagtagtaaatttgatctggtttgtagtagcatcaatcagaatacattccagaattggcattgttgttttagagggaactgctttcagtgagatgtttacacttttgagcaagttgattttctggcaaatgattttcataatgtgtataacttcctttcttgggtgatgtggttttttatagataaatatataaaaggaattcgtcgtctccgccgtaggggatgtgaatatgtgaaaaactccattgaaggttgatttttcaaggagttcggatatggataacttcgtgtaaaggtgtgcttaaagtatgtgtataacttgtgtataaccgaagcgcccaaaaagtggcgaaaagttatacacacttatacacattcaatcaacatcttatacacatgttatacagtcagttatcctcatccctgtggattaatttttttctttaaagtttcaatggtgtttttaaggttttcatcgttgttgatttctttttcaattttgtcgataccgtgcataatggtagtatgatcacgatttccaagacattttccgatagatttcagcggagttgagatgatttctctgcataaatacatggcaatctggcggggggttacaattttggagttacgcttatttccacaaaggtcatccactgtaacatcaaaatgttcagcaaccatggaaataatataatccggcgtgatgactttcttttcatcaggggaaataatgtcttttaacgcctgttcggcaagttcaagtgtaacttcctttttttcaagtttggcaaaagccatcaccttgttgatcgcgccttccagttcgcggatattggatttaatattgtttgcaatgtatttgattacttcctcgttaatatcatatccatccatttcttccttcttatgaagaattgccattcgggtttcgtaatccggcagtgtgatatctgcgatcaggccccattcaaatcgtgaacggaaacgttcttccaggatttccatatcttttggaggtttatctgacgaaataataatctgttttttggcactgtgcaggctgttaaaggtatggaaaaattcttcctgtgtagattcctttcctataataaactgaatatcatcgacaagaagaacatcaatgtttctgtatttttcacgaaacttggtcattgccgagttatttccattacggattgtttcgatcagttcgttggtaaactcttcactggtaacgtaaagtactttgctgttttcatcatgatcaataatgaaatgagcaatagaatgcatcagatgagtttttcccagacctgcaccgccatagataaagagcggattgtaggtatcacccggggattcggcaactgcaagagctgctgcctgggcaaatttattattgcttccgactacaaaggtatcaaaagtgtattttggattcaaatgagcttcctcgcagcgtgcgtcctgagactgcgcttttggagaaacttcctctttttttggaacatcttccggcaatatgaaattgatgtcacagttttccattccggtaacttcactgatcgttacctgaagtggaagtttatattttttacttatataattgagacctacctgctctgaaggcacgataatagtgacaacattgtcaactacttcgtaaacagtaagtggttttagccaggtattaaaagaaacgtcggacagatcatgttctgtcttgacgatttgcaggatttcgtcccatttttccacaactttgttcattttctggttctcccggttcgtattacttctatattaagtgtgtattgataatattgagttttccacaaactctgaccgtattcttaaaaaagacataaatatccttatatatattataataaaatgcctgttttcgcaatgtatatttgagggaaatgtggaaaaaagttatccccactttttatgtggattagtgtggataacagtggaaaagccaattccggttaccataatgtgacgttattcttttaaaaacgataaaaaatggggataattttatgcacagtaagaaaaatagaaataaaagcatttttttgaagatatgtgtaaaatagacaggagaaagtggaaagatatataggtattccacaagttatccacaagttatccacaaaatgtggataatattacgtaaaccaattatgtaatccacaatggcataaaaaaccatttaaatctttgtgtaaataatacttgacgaatccaccctttatgaatataattgaaatgatgttctaataagtaaagttggcgggcaggagagctgtagaatccggtgtctgtcatacttaaaaagttacaaaatttaacatggataatagataaaggaggtgctttacctatgaaaatgacatttcagccaaaaaagagatctagagcaaaagttcatggtttcagagctcgtatgagcacaaagggtggtcgtaaagtattagctgccagaagattaaaaggaagaaagcatttatcagcctaagaataagaccgcaattatgtggtcttttcttctcttaaaaaagagatcaggaaaggggattctatgcaaagatcagagtccttaaaaaaaaatcaagattttcaaaaagtatacagaaatggaacatcaaaaggtaatcggtatctggtgatgtacgtactgaaaaatcagtacatgaagaatcgtctgggaatatcagtaagtaaaaaagtagggaatagtgtggttcgccacagactcaccagattgataagagaaagttatcggttgaatgaagcggaatttgaaaacagtttggacattgtagtagttgcacgcccacaggcaaaggacagaacctatcaagagatagagagtgcgctgatgcatctggcgggaaagcactgcatagcaggtaagaacaatgataaagaagtttctgatcagaataattaaactctatcaaaagtatatatcaccgatgaagagaacaaaatgtccttatattcccacatgttctcaatatggtttagaagcaatcgaaaaatatggtgcattaaagggtggtcttcttgcggtatggaggatacttcgctgtaatcctttttcccacggaggctatgaccctgtaccgtaaagacaggaatgtacttgaaaattgaatattgatcgatcgaaggaacctcctgtcatttatggattctaggaggaaatgaacttggaaatgattttagcgacaaagagcagcactcctatcattggtcagcttgcgaccgttatgggatggatcatggatggtatttacagattgctgaatatctttggaattcagaatatcggtctttgtattgtcatcttcagtatccttatttatgctcttatgaccccactgcagatcaaacagcagaaattctctaagctgagtgcaatcatgcagccggaacttcagaaaattcaaaagaagtacaagggaaaaaacaacgatactgctgcaatgcagaaaatgcaggaggaaacacaggctgtatatcagaaatacggcgtatctcctacaggaagctgtgtacagcttgcaatccagttccctattttgatggccttatatcaggtaatttataaaattccggcatatgtaggaagtgtaagggatatccttgcatctgcagttaccagtattacaggtgtaaacggatatacagatatccttcagcagtttatcacagataataagatgacaagagttcagcttattatggatggaagtaaagctacaagtaattcagtcacagactttttgtatgcattatcaccttcccagtggaaaacacttgctgagacaagccagtttgcaggatttactgatacgctgaacagcactgcaaaagagatttcacatgtgcagaatttctttggtctgaatatcgctgatcagccactgacttatattaaagcagcttttgtaggtggatctgctcttcttgctatcgttgcgattcttatcccgattcttgcgtgggctacacagatgatcaacttaaaactgatgcctcaggcagcacagcagagcggcgattcacagcaggatgcaatgatgaactccatgaagacaatgaatatggtaatgccgttgatgtcagcagtattctgtttcacattccctgtaggtcttggtatttactgggtagcaagtgctgcagtaagaagtgtgcagcaggttgttatcaataaaaagatggataagatccagattgaagacctgatcagtgagaatatgaagaagatggaaaagaagcgtgagaaagcgggacttccacctcagaagattacaaatcaggcccatcagagcgccaagaatatcaataagattgaaaaaggcagcagcaatacaaatgttgagacaagagccaagaaggttgaagaagcttacaaagacgctgcgaatgcaaaacctggcagcattactgcaaaggccaatctggtaaaagcatttgatgagcgtaataagaagaagtagtcaggaacggaggggttggcatggaggattatatccagttttcagcgaaaacaaagagtgaagcaattacaaaagcatgtatcgagcttggcgtatccagtgaccagcttgagattcaggtaataagtgaaggcagcaacggatttttcggaatcggaagcaagcctgcagtaattaaggttcgtaagattgagtcggtttctgaggaagaagaaatgaaggagatcgtagagacagtgaaactcgattccttcaaagaggaagccccggttcaggaagaaaagaaaacggaagctataaaaccggtaaagaaagaaatcaaagagccgaaagctgtttctgagaaaccaagacagccaaaacctgtaaaggaaagggctgcaaaagaaaaacagccgagagaattcagagagccaaaagagaaacaagtcagagaaaagacgactaaaccggtaaagcctgttgagatccttacagatccggaagagattaaagaagtagaaaacagagcaaaggtattccttcgtgatgtatttgcgtccatgaatcttggagaagtagagattacatctgaatataacacaacggacggaagtctggaagttgactttgaaggcgaagatatgggaatccttatcggcaagagaggccagactctggattctcttcagtatctgacgagtcttgtggtaaataaaggtaaatcaaattacattcgtgtaaaacttgatacagaagattaccgcaagcgccgtaaagaaactcttgagaaccttgcaagaggtattgcttataaagtaagaaaaacccgcaagccggttattcttgagccaatgaatccttatgagagaagaattatccattctgctcttcagggaaataaattcgttgagacagtcagtgagggtgaagagccttaccgtcatgtagtggtaaaattaaaaagaaattaataatatgactgcttcattgcagatatgaaaaaagaatgttattctaggtgaaagcgtgaatagcacgtaactttgcgtgtgtacttttgcctggagtaacatttttattttacggaaagtcttgtatatataccagagagattacacacttgcagaaaaaaataacagtagtcagtgtgattttcctgttatgtatataagatgacagaattattgtaacagtctactgttccgcaggggcggaactattatagaacaggcaagtgaggagaaaaaaatggaaacaacaatcgcagcaatttccacagccatgagtgcgtccggaatcggaatcatccgtatcagcggcgagaatgccatggatgtgatttcccgtatctacagatcaaaaggcgggaagaaaaaaataaaagaagttccgactcataccattcattatggatatatttatgatggagaggaactgattgatgaggttctggtaatgatcatgcatgcaccgaggacttttacaggagaagatacagtagaaatagactgtcatggtggtgtatatgctatgcagagggttttggatacagtgctgaaaaatggtgccgaaattgcagaaccaggagaatttaccaaacgtgccttcctgaacggacggatggatctatcccaggcagaggctgttatggatgttatacaggcgaaaaatgaatatgcgcttcgcagttccatggatcagttaagaggttctgtgcagaaagcaatccgagatatcagagaaaagctgatttatcacattgcatatatagaatcggcactggatgatccggaacatatcagtctggatggatatccccaggaacttctggaagttgtggataatgaacagaaagaagtgaagcgcctgttgaaaacttcttctgacggaaagatgatccaggagggaatccagacagttatccttggaaaaccaaatgccggaaaatcctcactgttaaatcttctgatcggagaaaaccgggctattgtgacagatattgcaggaacgaccagagacattctggaggaatatatcacacttcatggaatatctctgaagattattgatacagccggaatccgggaaacaaaggatattgtggaaaaaataggggtagacagagccagagaaatggcacagaaagcagatctgattctttatgtagtggattcttctgttccgcttgacgaaaatgatgaagaaatcatggaaatgcttactggaaaaaaggcgattatcctgtataataaaactgatcttcagccggaaatccagccggaaatcctgaaagaaaaaacaggacatcctgtaattccgatttctgcaaaagaagaaaaaggcattacagaactggaagaacagattaaagatatgttttttggaggagagatttcctttaatgatgaggtatatattacaaatgcccgtcataaagcagcattggaagaggctgacagaagccttgatctggtcagaaacagtatcgaaaggggaatgccggaagatttcttttctatagatcttatgaatgcatatgaaaatctgggtaaaatcctcggagagtctgttggtgaagatctggtaaatgagatattcagcaagttttgcatgggtaaataaaaatcaaaaaatcgccttcggcgatttttgaaagaatagaatgagcagttgtaaaataaaaggagacaaaatgagaacgttagtagaagattatgatattgttgtagtcggtgccggtcatgccggatgtgaagcagcacttgcgggcgcgcgcctgggcctgaatacagtgatgtttactgtaagtgtagacagtatcgcattaatgccatgtaacccgaacgtaggcggcagttccaaaggccatctggtaagagaacttgatgccctgggcggtgaaatgggaaaaaatattgacaagacctttatccagtccaaaatgcttaactgttccaaaggacctgcagtgcactccttacgtgcgcaggctgacaaacaggcatacagcaatgaaatgagaaaaacgcttgaaaatacacctaatctgactattaaacagggagaagtaacaaaacttctggtcgaggacggaaagattacaggggtaaaaacatattccggtgcaacttataactgtaaagcagtggtcctctgtacaggaacttatttaaaagcaagatgtatttacggtgatgtaagtaattatacaggaccaaacggactgcaggcagccaactacctgactgattctctgaaagagctgggaattgaaatgttccgttttaaaacaggaacacctgcccgtattgccggaaatacaattgactacagtaaaatggaggaacagtttggagatgagagagttgtaccattttcattctcaactaatccggaagatgttcagatagagcagaaatcctgctggctgacatatacaaatgagaaaactcatgagatcattcgtgcaaaccttgaacgttctccgttgtattccggtatgatcgaaggaaccggtccgcgttattgcccgtcaattgaagataaagtagttcgttttgcagataagaaccgtcatcaggtatttattgagccggaaggtctctatacaaatgagatgtatattggtggaatgtccagttctctgccggaagatgtgcaggaagaaatgtatcattccgtaccgggactggaacatgcaaaaatcgtaaaaaatgcatatgccatcgaatatgactgtattaatccacgtcagttatatcctacactggaatttaagaaaatcaaaggactgttcagcggcggtcagtttaacggaagctcagggtatgaagaagcagcggcgcagggactgatcgcaggaattaatgctgctctggaagttaaaggtcaggaacagctgattcttgaccgttctgaggcttatattggtgttcttattgatgatctggtaacaaaagaaaaccatgagccatacagaatgatgaccagcagagcggagtacagattacttctccgacaggacaatgcggatctgagacttcgtaaaaagggatatcaggcagggctcatcagtgaagaggattatcagaaaatccttacgaaagaagaacagataaaaacagagatcagcagagtagaacatacaaatatcggagcaaacaaagagattcagacccttctggaaagctataacagcacaccgctgaaatccggaaccactctggcagaactgatccgccgtccggaactttcttatgaagcaatcaaaccacttgataaagaacgtccggagctgccatgggatgtacaggaacaggttgacattaacatcaagtatgatggatatatccgcagacagttaaaacaggtagaacagtttaagaaactggaagcaaagaaaatcccgacagatcttgattatgagaaagttggaagcctgagaatcgaagcacgtcagaaactggaagcatacagaccgatttcaatcggacaggcttcccgaatttcaggagtttctcctgctgatatatcagttttactggtgtatctttccagtacgaaataattaatataatacgctttaatgtgcttataaaaacaagaaattggcaaaaaatattaaaatagtacataaaagagtaaaataacggactataaataacagataaaatcataaaagcacataaaacagccctgtaaaatatacaaaaataataaataaaggtagaaaaaggagaataatacatgccgtataatctgacgacattggaaaatggatgcagagaactgtgtatagagctgagccagaagcagaaaaatcagtttatccagttttatgaatttctggtagaaaaaaataaggttatgaatctgacaggtattactgagtttgaggaagtacttacaaagcactttcttgacagtcttgcctgtgtaaaagccattgatatgacaaaagtaaaaacaattatggacatcggtacaggtgccggatttccaggtgtgcctttgaaaattgcttttccacatctggaggcatgtctgctggattctctgaaaaagagggtaaacttccttgaggaaagttttgagcttcttggattagaagggattaaggcgattcatggaagagcagaagagtatgcaaaaaataaagagtatcgtgagaaatatgatctctgtgtatccagggcagtatcaaaccttgcaactctgtcagaatattgtcttccttatgtaaagacaggaggaactttcatttcctataaatcaggaactgtacaggaagaggcagaagaagcagagaaagcaatcaatatcctcggtggtcaggtgaaagacatcacatactttaaattgccggactccgagattgaccgatcccttgtcattataaataagaaaaaatctacacctggaaagtatccgcgtaaagcaggaacaccattaaaagaaccattgtcataataaatctatgtatagttgtctcatgaaatcttctggcaaaaaatgccgagatttcgggacagctatttttttcaaacaaacatcacagaataatcacacttttatcctaatttcatcacaacttcatcataaactatttttatagagatgtcctcgggttcccccattctctgtttcacctggggacattttctatattttattttggcaaaaattaagaggaggagaacacattgattgaagtaaacaatctggttaaacgatatggtaaccatacggcagttgaccacctttcctttaaaatagagaaaggcaaaatctatggatttctgggaccaaacggtgcaggaaaatccactacaatgaatatgataaccggatacatcgcatccaccgaaggaaccgtcaaaattgacggacacgatatcctcgaagaaccggaagcggcaaagaaatgtatcggttatctgcctgaacagccaccggtctattttgatatgactgtcctggaatacatgaaatttgtggcagatctcaagaaaatcccaaaagataaaaaagcaaacatgatcgaagaagtcatggatatggtaaagatttcagacatgagaaaccgtctgataaagaacctgtcaaaaggttacagacagagagttggtcttgctgaggcgattatggggtatccggaggtgatcatcctggatgagccgacagtaggtcttgaccctaaacagattattgaaatccgaaccttaattaaagaattaaaaaagaaacataccgttattctcagctcgcatatactttctgaagtaagcgcggtatgcgattacgtgctgatcatttctcatggaaaactggtagcaagcgatactcctgagaatcttggaaaacttgcagagggatctaatactctggagatgcttattaaaggtgaaaaaatacagatcaggcaggctctcgagggaatcgagggagtcaacagcgtaacaatggaaaaagatgagaaacagaatctctggagtgtgaaagtttcaacagaggagcagaatgacattcgggaaaaagtattctacaaaatgtcggagattaacagcccaatctatgagatgaagtccaggaaagtatcactggaggaaatcttccttgaacttactgcatccgataaaccaatatctgcagacgaagtcccaaatacaccggaagataaagatactgatgccggtagatcaaacgagacaaacgtaaaacagacatcagcagaaataccggaagaacagaataatgataaagggggagagaaataactatgacagctatatataaaagagagctgaaaagttacctgacatccatggtaggatatttatttatctttttcattcttgtattgacaggtatttatttttcagcatatcagctttcatcagcatatccgaaatttgaatacaccttaagcgcaattacctttgcattcctgatcggagtaccgattttgactatgcgtgtacttgcagaggaaagaaaacagaaaacagatcagctgcttctgacagcaccggtttctgtgagcggtattgtaataggtaaatatcttgcactggtaactgtatttgctgttccgatggcagttatgtgtacttatccactgattatgtccaggtttggcacagtagagtttgcatctgcatatacagcagtcctgggattctttctcctgggatgtgcaaatattgcaatcggtgtatttatgtcagcattaactgagagccaggtaattgcagcggtactcacatttgttttcttatttgcattttacatgatgaatggtatttcttccttcttctctcagacatctatgtcgacatgcgtgacatttgggttattgatcttggcagcagccatcattatctataccatgatcaagaatattctgatctcagcagtgatcggtgtgatcggagaagtggcactgattattatttatgtagtaaaatccagtatttttgagggcggtattcagaaagtcctggatgtgtttaatctgagcggacactttgataattttacaagtaacatctttgatataaaaggaattgtatattttctttctgtgatcgcagtatgcctgttccttacaacacagtctattttgaagagacgctggaattagtggggaggtgaaagaaaatgaaactgaaagaaaagatgaaaaataataagcataaaaaatttgacaaaaagaaactgattggcaccatcagtaagaagcatatcaaaaacggttcttacacaatggttatgtcagtgatatttattgcagtagttgtagtgctcaacatgatcgtaaatgcgattccgtccaaatattcagaaattgatatcagcagccagaaactctacagtattggtgatgatacaaaagcaatgctgaaagatctggacaaggacgtaacaatttaccagattgcacagagcggttctgaagatgagaatattaccaatctgcttaagaaatatgaagatgaatccaagcatattaaagtagagcagaaggatcctgtagtaaatcctaaatttgtaacggaatatacaagtgatgatctttctgcaaacagtctgatcgttgtatgcggcgacagaaataaagtcattgattacaacaatatctatgagagcacaattgattatcagacctacagctctcagaccaccggtttcgacggtgaaggtcagatcacaagtgcgatcggatatgtaacatccgaagatctcccgatcctttatacactcgagggacatggtgagaaggagatggattctactatcaaagaagacatcgagaaggcaaacatggatattcagtctctgaatcttcttacagagggaagtgttccggatgatgcagactgcctgttcattgattctccatccacagatatttcagaagatgaaaagactgctattattgattatcttgaaaatggcggaaaggcgatgattttctctgattatacaacagaagacctgccaaactttgatgcagttctggaaaactatggtgttcagagagaagctggaatcgtatttgaaggtgataatcagcattatgcaatgcagatgccatattatctggttccgactataaacagcacagatgcaagctctgagactgtttccggaggatattatgtacttgtaccatatgcacagggaatcaaaaaaatggatgatgtaagagataccgtaacgatcaacagtatcctcaccacatcagaccaggcatattccaagacagatctgaacagtgatactctggagaaagaagacggagacgaagctggcccatttgatctgggagtaagcatcacagagactctggatgatgacaaagaaacgcagatcgtatactattcaacttccaatctgatggaatcacaggtaaatcagatggtatccggcggaaatgagaagctgatcatcgaatctctgaagtggatgacagacacagaagacagtgcaaccgtatctatcccatccaagagcctgtctgtatctaatctgacacttacagactatgatgctgcattctggaagatctgcaccatcggtctgattcctggattcttccttgttgtagggtttgcagtttggatgaagaggagaaaagcttaaatgaagaataaaactgtaaaaatggttcttgcagttgtagttcttggtgtctgctgcggggcttacgcaggtgtaaaaacctacgtagcccatcaggagcagaaagaatccgaagaagattctgaagaaagcacaactgtatttactgcatcaacagataacattaaatctctggattttatggttgatgatacagagacaacatttgaaaaagatgatgacagctgggtaaagaaagacgaaacagattttccggtaaatcagactactctggacagtgcagcatctgctattgcatctgtcgattcagacagagttctggaggacgtagatgatctttcagaatatggtctggactctccgtcaaacacgattaagattgtaacaaaatctgatgaggaagatggcgatgacataacaactacactgtatgtgggagatgaaaattcctccaccagtcagtattatgtaagaaaagatgatgatgagaagacagtatacctgatagattcttcctgcgtagagccgtttgccaaatcattgaatgattatgcgcagatggaagatttccctgcaatttccaatacagataccattacaaaaatttctgtagacggcgataattcctatgaattatcaaaagacgaagatacaagtacctggtcagtaaaaggcagcgaggatgaagaaaaagcagactcagctaccgtaagttctttggtatcttcattcggaagcatggcatatagttcacttgcagattataaatgtgacgacaagagcaaatatggtctggataaaccatatgcaacaatcacagtagattatcaggaagaagttgctgatgatgacactgatgaagacacacaagatgatacgacagcttccggtgagacggcagatgaagatgcttcatctgtggaagaaaacagtgacgatgctgaacaggatacagaatcagacgaaagtgtaagtgaaactacggatgaaacatctgaggctgaagatactgacggtgaagaagcagaagatgaaacatcagaaaactcagacagtgcatcagacgatgaggattcttcggaagaagaaactaagatggcagataagcagcttacaattcttgttggaaatgaaacagatgacagcagcagatatgtcatggtaaatgacagcaatgaagtctatacgatgtcaacggatactctgtccgcactcactgataaatcagaagaagacttctgggatatgacagtaagttatgtatctttaaacagcctcggaagcctcaaagtaaattatcagggcagtgattataaagtaaatgtttcacgtgaaacatccacagatgatgatggaaacgatacagaaacagttacctataaactgaatggttctgatctggatgaaacaacatttacaacattctacaataaactgatcaacatgacggctcagaaacgtctgacagataaatatgaacctgacggtgatgcagaactgacagctatatttacagaagaagacggtgatacacaggaagttgcatactatagctacgatacaaactattatgcagcagtggtggataataaagtatatctcgtaaataagatgaatgtaaaagaactgttcacagcatttgaatcagttgttggaacagaagaagacagttcagataagacagattcagacgaagcaacaacagatgatactaaatcagattcaacagatacgtcgggtgagagcatagaagagtccgaggacagcacatctgaaacagccggcacaacaaacgattctgatatatccgaagaggagaatacagattctcaggaaacggacagtacagaagagtaaaagaataaacgaatctataaaaaagtgaggcaggcatatagaatttcttccatatgcctgcctcactttttgttgtattagagcgtgtttgaaaaatcattcccacaatctgcacgccccattttgcggtatattttgtccgaattcggttgctgtagtcaccgcaacgttgccttcttccgacttgaaataaaaaaatttatccttcaaaactgtctcaaaatcaactcgtcgactcattctggcttaaatataaggcttaaaagaagattttaacctgttcaagaaacgcttcaggtgcttcaacatgtggaagatgttttgtttctttgagaatagaaacttcaatagccgggttggaggcacaataatcatcagtgatagcctttccgtttggctctgtttcaccttcaacaatataaatactgttatccagtgccttaagtgcatgacagatatttatatttatatacttagctgcaagactggagtacaaaaatctggtataatatccacctttatgagctgcttcataataagcatctgccatttgattatccacatggaatggattacaatacatcttctcgataaaaagattatttatattatcacgtgatacgatcatatgataaaccagagttccgaaaatcggaatttccagagctgcttttaacaggcggtcctttctgtttggcatctgttttaattgagtcaggctgggcggatttaccagcatgattttgttaaaaagttctttctcattgtgacaggccatagtaacaaaagagcctgaaaaaccacttgcaatcacatctgttttctgaccaattatttttttgataaaatcactgatcatctgaacataaacaaaatttgtataggtaatgctggatttgtccgaacgtccgcatcctaacagatcaacagtatatacggtatggtcaattgccagttcgtcttcaattttgctccattcatacccggaagctccaggtaaagtgtcatgaatcaaaagaatcggtgacccagttccctttttagtataataaatgttcccaaagcgccattcaaagtaattgtcattagaaatgtggagcatctgttttaattgtgcagcagtagcaatcgtgtggttaatgaaatgaacagcaacagttgcgccggtcatcagagcagcaaatgtaagaaatttgtgcttgtttttactcattttcggcctcctttatcaagcataacaagtgattagcctgctaaaattatatacccatattataccgcgatactgtctgttttacaagaaaatatgatgcgaaaaaaagaaccatatggattgatgatgttactgttcactccgttcacagcaacacgcttcgcgatgcacagaatttatgctaatcgcataaattcgcgcggtatgtctcgggttttctgtgaccttcactcacaaaaaacacctcgcgggatattaccagtgaacagtaacttgatgattactgttcacacaccacaatcctgcgaggtgttttggcatgaatgtgccaaaatcccgagacatacaagccaaaattccattgccgcaggcaatctggaattttggctgcgttactgagaacggagtgaacagtaacgattgatggaaaaagaaaatgtcaatcaccacaaaatatacaatatttatgctaaaaataatgtgtttttttatgtttcacgtgaaacattatgtggcatgattaaaataaaagtgttataataaacctgcgtatgcctgttggcattataaaaaataatgtaacaggcaaaataggaataactacaattaaaacctcataaaggaggaatgaagttgggaagaattatagcagttgctaatcagaaaggcggagttggaaagtcaacaactgcaattaatctttcagcatgtcttgcagaaaaagggaaaaaggttctcgcaattgatatggatccacagggaaatactaccagtggtttcggcgttgataagaacggcatagaaaatacattgtatgaacttttgcttggagaggcagaaacgaaagacacgattgtaaaagatgttgttgagaatcttgacctgattccatctaatattaatctttccggtgcagaaatcgagctggtaggaatcgatgataaagaatttatcttaaagggaatcacagataagcttcgacgtaaatatgattacataatactggattgtccgccgtcattaaatatgctgacgatcaatgcattaaccgcagctacatctgtattagtgccgatccagtgtgaatattatgcgctggagggactttcacagctgattcataccattgatctggtaaaagaaagactgaataaacgtctgaaaatggaaggcgtagtattcacaatgtatgacgcaagaacaaacctgtctctgcaggtagtggaaaacgtaaaagagaatttaaatcagaatatttataaaacaattattccacgtaatgtaagactggcggaggctccaagctatggacagccgattaatatctatgatccgagatcagcaggagcagaaagctacaggcttctggcagaggaagtgctcaacagggaggataattaatggcaggaagaaaaaacggtcttggcagaggcttagatgcattttttccagacagaacatctgttgtcaaagaacctgccagaaagacaataaccaaaacagttaaaacagagaagaaatctgacgtagctgaaaaacagacaaaccctactgttgcaaagaagcaaacagcagattcgaaaacaggggcaatgatcgtaaagatctcaagtgtagagccgaatatggatcagccacgtaaacagttcgatgaagatgcactcatggaactgtctgagtctattaaacagtacggcgtactccatccgcttctcgtgtctgataaaaaggactactatgaaataattgcaggtgaaagacgctggagagcggcaaagcttgccggactgacagagattcctgtaattgttaaagagttttctgagcaggaattagtagaaatttccctgattgagaatattcagcgggaagatttaaaccctgtggaagaagcgatggcatataaacgactgattgatgaatttcatctgaaacaggatgaaatcgcagagcgtgtagggaagagcagaacagcagtaacaaatgcaatgagacttctcaaactcagtgaaaaagtgcagcagatgctgattgatgagatgatcactgctggtcatgccagggcaatcctttcgatagcagataaggaaaagcaggaatcaattgcaatgaaggtttttgacgagaaattaagtgttcgtgaaacagaagcgcttgtaaaacgtatgctggagccgccaaaaacagcaaagaagagcaaattcagttctgctgaggatgcaatatatgagagtctggaagaaaaaatgaaaagtatcatgggtaccagagtccagattcacagaaagaaaaatgacaaaggtaaaattgaaattgaatattattccaaggatgaactggaaagaatcatagatcttttcgaatccattggttaggagtgacagtaatatgagtggcatttttgaaaatcttggaattgattccgggatcatcattattatactgctgattcttactatcttcctgctggtaaggaatatcagtatgaatatgcgcctgagccgtctggaacgtaaatataagacgttcatgaaaggttcagatgcacagtctctggaaaaagtattcgttagaaaattcgctcagatagataagctctatgatgcgaaggaagaacatgatcatgatcttctttttatcaaaaagaatcttgataaaatgtttaataaatatggtgtagaaaagtatgacgcatttgatgatgtaggtggaaagttaagttttgcgctggctttgctggacaaagagaacacaggccttatcttaaatgcagtacacagccgggacaattgctttttgtatatgaaagaaattgtaaaaggcgaatcctacgttatgctcagccaggaagaagtagaggcacttcgtaaggcagtgaattttggactggataatattgaagaataaagttttttaaaagttactgtgaacggagtgaacagtaatgtttaaaagttgaaaacaagagcatactaaaagagaatctgttttgtgcaggaatgcacatgatatgataaattgatatcagggggaaagttgttgccagattttaccctgacatcattacataatgtaatagaatatttcaggaggaacaagatgttagatattaaatttgtgagagaaaatccggaagttgtaaaacagaatatccgcaacaaatttcaggataataaactggaattagtggataaagttctggaactggacaaagagaatcgcgaaatcaaacaggaagtagaagctcttcgtgcagagagaaataaaatttccaaacagatcggtgcactgatggcacagggaaagaaagaagaagctgaagaagtaaagaaacaggtagctgcttccggaacccgtattgaagaactttccacaagagagaaagaggtagaggaagaacttctcaaagatatgatggtaattccgaatatcattgatccatctgtaccgatcggtaaagatgacagcgagaacgtagaaatagagaagtttggtgaaccggttgttccggattttgaagtgccataccatacagaaattatggaaaactttgatggaatcgatcttgacagtgcaagacgtgttgcgggaaatggtttctactatttaatgggagatatcgcaagacttcactcagcagtaatctcctatgcacgtgatttcatgataaacagaggttttacttactgtgtacctcctttcatgatcagaagcaatgttgtaacaggtgtaatgagttttgctgaaatggatgccatgatgtataagattgagggtgaagatttatacctgatcggaacaagtgaacattccatgatcggtaaatttatcgatcagatcattcctgaggaagaacttccgaaaactcttacaagctattctccatgtttccgtaaggaaaaaggtgctcatggacttgaggagagaggcgtttaccgtattcatcagtttgaaaaacaggaaatgatcgttgtctgcagaccggaagagagtccgatgtggtttgataaattatggcagaatacagtagatctgttccgttctctggatattccggttcgtacacttgagtgctgctccggtgacctggcagacctgaaagtaaaatctcttgacgtagaagcatggtctccacgtcagaaaaaatatttcgaggtaggaagctgttcaaaccttggtgatgcacaggcacgtcgtcttaagattcgtgtaaacggaaaagatggtaagaagtatcttgcacatacattaaataatactgttgtagcaccgcctagaatgttgatcgcattcctggagaataacctgaatgcagacggttctgtaagtattcctaaagctctgcagccatacatgggtggtatgacaaagattgagaaaaagcacgcttaatggagggtgagctttttcagggaggtgttcttatgcacagttatctgagggcagttggtttttccaggatcaccaaaagaagcagtatcagacagatcattacggatgtggttgaaacttatgatgagaaaacggtcatagagaactaccctgatggtatgtttgcagagttttccaagaattatggatgcgattgtggaattactgtctgcgggcagtatgatgaaaacaacgtattttatccggattattatttccctttttttcgcggaacaggcattacaacacaggagagtgttgtgatagaaagacatgcagacaaagaatcttttgcaggtgcctgtgacgatttgagaattggggttactttaattttctatcttcagaatgctgctgagtatctgcaacagcgtgaaaaaggcaacatacttccgggtggccagcctttaaccctttccgggctggccagggaaggaaaaatcctttttcctgtagagaaagataaagaagcagtaaaagcagaacgtgaactgacaaagaacagaaatcatctcattgcagccgccagaaacggtgatgaagaggctatggagagcctcacgatggaggatatggatacatattccatgatttctcagcgtatagttacagacgatattttttcaatagtggattcctatttcatgccatatgggattgaatgtgatcaatatagtgtcatgggtgagattctggattttatgacattcaagaacattataacaggagaagaaatctgccagcttacattagactgtaatgatatgcagtttgatgtttgtatcaataagaatgatttgctgggggagccaaagatcggacgtagattcaaaggaatcatatggctccagggacagttgcattattaaaattaaaagatatgttcagaatgatagcatgatagcatggacgagagtacttcgtccatgctttttttggtgtcatagtacttcgcgctctgctgaactgtcttgattgcatttttttatggagttgctatagcatataatttttgatttataaaaaacaatgggcaagatttctttgtaatgtttcacgtgaaacattgtaaaatatcatgtaatttctacacttgacaagagataggaaaatattactgtttacgcgccactattctgcgaaatattttgatatgaatatgtcaaaatcctgagacatacggaacagaaatggaataaagatatacaggaaaataccgaaaatccaggagatactacatttccggcagtaaagggagatgcactttctatgtgttgatttatttgtaacatttttcgtttacagatgttatattagtgaaagggataaaaaactggaaacaaaacagatatgaaagctatatccagcgcgaaaatcagggaagggggaatgatagaagtggataatcaaatcttattaaagctttacagcctttatcagaaagaattatatttatatttatattcgctttgtggggacagatatctggcagaagatttgctccatgaaaccttcctgaaagcacttctggccttgccggacggacatagcaacatgcgggcatggctctatatggtagcgagaaacctgttctataatcaacagaaaaagaaattacgggagattctgatggatgaacagatatatcctttagaagaaaaaacagaagaaggtctgcctgaaaaaattttcgaggaagaagacaggcggatgctttatcaggcaatcctcagactggatataaagaagcgagaaatcattcagatgcagtattttggcggaatgacacagaaagaaatcgcggcagttttacatatcacgttggaaaatgtacgggtgcttgcataccgggcaaggaaagaattgaaaaaatatctggaagagtgtagaaaggaggactccaaatgacgtatcgtgagttactgaacttatataaacagggaaaattggacgatgttagaaaaaaagaagttgaagcagctattgaaaaacaggacgcaatcagtgaatttctctatgaagaaggtgagataccagaattttctgatctggagagtgagaatgcagagaatccggaaaataaagaatggttagcaggacagaaaaacaatcaaaaagatgagatcaacaggcaatttataaaagaaatcagatggtcaatccgcaaggcttttattaaaatgggaatgattgtaggagtagctgtccttgtaattgttttatgtgctgtatttatcctcccaaaggccgtgtcggatttttattataatcccaatgaagtagttggtaaatatgaagaaatgactacgaccagaatggatttggatctttctgtttattctgaactgtttttgccgggtaatcatcgtagtcaggtcagtgcggtatcgagagggtatggtgaatacgatattatcattccgcagacttttagttggactggaaaattcacttctgtcagtggacgtttggtgcgaggaaatcttattttttatgacaataacatattgagcagaccacttatgcagttttatcttccgggagatacgaccgcgtgggaggcgtgggaagtgcatgaaaatggaaaagaaactaaaatagacacagaaatgcgtaagggggaaagcattcaggattccaaagacgcaatcgcagaatacaatgataacgactggtatcttgcctatgtttccataaatgatattgtggattacagagattttattgagtggtatcagaaactgtctgatgataaagaactggaatggggagaactctggtgtgcagttcatacggaagacgcggatggttactgtgtggaaccaaacattggtttctgtccgtatccgtcggggatgagcatgaattgggacagagagaaatatccatatttgtcgcttctggataatacagatatctgtcatgatgtggatgtgacagacgaagaaactatgcagacccactttatcagcatgctttcctacattcaggattatgacgacattatttcaatgatgggacagacgacggattctccgaacagataccaggatatgattaactatgtaaagaaaaatgggctgaagatccatggctttgcagtttatgcaaagaaaaagaatcttctcgaattatataaacaagatatggtgtcctatgtccagacaatactacaaaattaagaaagaagtgcagatatatcagaagagatatttctgcacttttttaatcaaatcaggtaagcagcgaagcggattgtgaatatttgtctgaatgtaaaatttaaaatgagaagccagattatgcttgtaatttttctttagatatagtaaaatcatagatatgggttaggaattctcatagttcagttagatagagtatccgtctctataaagagagcaggggtatttctctgagtaaaaaaacaactcagaaaaatctgtgattgacagcttgtaaaagagctgataatctaatatatggccgaagggaaaaatcccagaaacccagtaaaatcaagggtttgcggcatgtgtcgtcatagctcagctggatagagcactcgcctcctaagagaaagccgaggcattccccaaagggaaaaatgaaaaacaactttcagttcgaatctattctgaaaaatgctaatggtgacaacaaagcattccccaaattggggaacgttctaatgttaccaaatcaaaaaaatctgtagattgacaactcgaaatagagttgataatcttatatatggccgaagggaaaaatcccagaaacccagtaaaatcaagggtttgcggcatgtgtcgtcatagctcagctggatagagcactcgcctcctaagcgaggggtcggaggttcaaatcctcttggcgacgggcttcaaagcgttcgaaaatgttagctggattagctgacagcgaacgcttttgttattttctaatcacgttcgtgacacaaaattccattcaaaatgatcaatttccagctaacgcaatccgatttttgttagctgacagctaatcaaaattaccggtttgcaaacatgggttttaagaagtccagctaacatttgggttccgctccgttgtcaccccttattcggggatgtaaatcagagaaaaggcgggaaaagaaacaatctctcccaaacctgcaaactggaattagctgaaacagtattcaattctattagctgtagctaatggtcaaacagcaatgtctgtttggaactttactatctataaaagttccaggcaggcattttttatttcctgaatcctggaggaaaggagtcaagatgactgagccaaacagacaatcaggagaaaacgaagaaagaatcatagaaattgagattgagcgtcttcgtccgttcaaagagcacccgtttcaggtaaaagatgataaggaaatgtttcttttgcaggaaagcattgagaagtatggaattttaaatccgctgatcgtcagaccagtaccggatggatactatgagatcatatccggtcacagaagaaaacatgctgcggagaaactgggataccgtaaagtaccggtaatcatccgggtattaagtgaagatgattccatcttgagcatggtagattccaatcttcacagagaacggatcagctacagtgaaaaagcttttgcttacaaactgaagaatgacgtattaaaaagaaaaagtggtcgaaaaaagagccaagttgaccacaaaacaccaagaaagcgggcaatagaaatcatcagtgaagattgtggtgatagcccaaaacaagtgcagcgttatatttcactgacaaaactgataccggaaatgttgcagaaactggatgatgagattatttctttttgtccggctgtagagatagctgcattaagtgaaaaagaacaaagagaactgcttgtagcaatggagtatgcacaggcaatcccatcactctcacaggcccagaggattcggcaactgagtaaagaaaaacagttgtcactggaaaagatggaagagatcatgtgtgaagtgaaaaagggtgagatcacaagagtggcattcacaaacgagcagttgcacaagtattttccaaattcttatacaccggcaatgatgaagcgggaaatactggcactgttgaaattatggaaaaaagaatcatgggaaagttaaaggaggaagaaatcatgtgtaaagttatatccgtagtaaaccagaaaggtggcgtcggaaagaccaccacaaccgtaaatgtaggcattggactggcaagagaaggtaagaaagtgttgctgatcgacgcggatccacagggaagtttaaccgcaagtcttggatatgaggaaccggataatcttcgcatcacattggcaacgatcatgatggatgtcatcaacgaagaagaaatctctctggaagatgggattttacatcaccaggaaaatgtagatcttctcccggcaaatattgagctttccgcactggaagtaacgatgggaaatgttatgagcagagaaatgatcatgaaagaatatatcgatgcgatacgatgccgatacgattatatcctgatcgactgtatgccgagccttggtatgatgacaatcaatgcactggtctcttccgattctgtgttgatacctgtgcaagccgcatatctgccggtgaaaggacttcagcagctgatcaagaccattcttacagtaaagaaaagactgaaccggaaactggcgattgagggcattctcctgactatggtagatttcagaaccaattacgcaagagacattgcatcgagagtacatacaacctacggaagccagattgaagtatttgaaaatgtgatcccgatgtctgtaaaagcagctgagaccagtgcagagggaaaaagtatttacatgcactgtccgaaaggaaaagttgccgaggcatatatgaaattgacacaggaggttttgagtaatgaaaaatagaagtggcgaaaagattaaactggcaagtattgatgaactgcttggtgtggtaaatgaagagtcagcaatggagatagaaattagtaagatccatccgtttaagaatcatccgttcaaggtgctggatgatgaaaagatgcaggatctggttgaaagtgtaaagatcaatggagtactgactccggtactgcttcgcatggatgaaaatgaagaatatgaaatggtatccggtcacagaagaatgcatgcagcacagcttgcaggacttacgactattccggcaatcgtaagagaattatcggatgatgatgccattgtggcgatggtggacgctaacattcagcgagaggaactgttgccgagtgagaaagcttttgcttacaaaatgaaacaagaggccatgaaacaccaaggttctcgaacagacttgactttgggacaaaatgtcccaaagttcaaaagaacaacggaagcaattgcggatgggacaggtgaaagttataaacagattcagcgttacattcgactgacagagttaattccggaacttcttgatctggtagatagcaagaagcttcagttcacggttgccatagatatctcctacatcgataaggaagtacaagaatggatttacgaatatattagtgacactggatttattaagccaaagcagattgcagcactcagaaatcagctgaatgatggaccgatcaatcagatccagatgttatcgatttttaataactgtgtgatggcaaagaagatatcccggtctctcaccttctcagaaaagaaactaacaaagtattttccagatgattatacagccaaagatatggagcaggtgattgaatcattattagaaaaatggatgcaggaacagtcctgttaaggatagaaaaagctaagaaaacaaagtcaaagaagtttaaaaagaggacttcttagcagaaaatgaaaggaggaaattatggagaaaaaaatgacatttaattatttttatggtaccgaagctgatcagttcagcttctaccgcataccaaaagcattatttacagacagttattttaaagatttatcgagcgatgctaaaattttatatggactgatgttggatcgaatgtctctttccatcaagaatcagtggtttgacgacaaaaacagagcatatatctacttttccatcgaagatatcatggaattactgaactgtggcagaaataaagccattaaatccatgagagaactggatgacgaaacaggaattggtctgattgagaaacgcagacagggatttggaaaggtgaacgttatctacgtgaaaacctttatgcctgagaaaacagatgagaaaaaatttggagaggaattaaagaagtttaaaaaacaaacttctgtggaaaatgaggaatctacagaagtttacaattcaaacttcatgaagtcccaaaatcaaacttctagaagtctcgaaaacaaacttcaagaagtttacatttcaaaccctaataatactaatcttagtgatactgaaatgaatgataataaatctaatcatatcatatctgtggatgagaaaagatttgatagcgataaccgctctgaggattatcaggcttatgaaaaccttgtcaaagagaccattgattatgaatcactggaagtaacccatcatgacgatatgcgacaggtagatgaaatcgtgaacctgatcgtagaaactgtgatgtgtaaaaatgacaagatcttgattgccagcaactggtatccggcatcactggtgaagaaaaaatttctgatgctgacctattcacatatagagtatgtcttacactgtatgcgtggtaacaccacaaaggtgaagaacatcaagaaatatttattagcagccctgtttaatgcaccgtcaacgatgaacgggtattatcaggcagaggtgaaccatgatatgccaggactggtaagataggaggtgtacatgtttattttaaaacttgctgggaagatattattactgccggtatggctgattctttttgtgatcggcctggcagtgaagatgacagtacagacttatgcggttgtcagagggatccttgggtttatattcactttgttgattatagcgactgcatactgttatcatgactgggtacaggttgcatttctattttcgctgagtgtaattctgtatctgatcctgtttgcaggagtattcgtggacactgtactggacatgacaagagaacgtattattgattttattatatcgtgaggaggatatgaaaatgagcgaaaacaatgattatattcagttaccaccactaaaaaaagacacaccatccgatgtggtagcatttatgtgggagtacctgaaagtaccggagaattcaagagaaaaagttaagaatctgcttaaagatgcaaatgaaaatagagtaaaattaagtcatcaggcaccaacactgtatgatgttgtcccaaaagaagaaattgctgaatttgaagagcttatgcgcaaaaccatagctgacattgtatcagaagccagtagcgttgcctgttgggtgtatgtgcagaaatatgtgaagcacaaaaccctaaacgaaatgctgcaagaattgccagacgtaggtcaattcatcctagctatggatacctggtttgaaaaactgatggagaaataatctaggaaaatagtttaaagtttacatgttatgatcatgtatgaagttggaacagaataaaagattgtgctatactattgttcaagaaaaaaactcattgacatatttcaatctatttaggaggataaacgatcatgtgtacagcagcaacttataaaacaaaagatttttactttggacgaaccctcgattatgaattctcttatggtgatcagatagtaattacaccacgtaattatgcgtttaattttcgccatgttggcgatatgaaaaatcattatgcaattattggaatggctcatgttgcagaggattatcctttgtattatgatgctatgaatgaaaaaggagtggcaatggcaggactgaattttgtcggaaatgctgtttatgccgcgattaagtcagatgtggaaaatattgcacagtttgaatttattccgtggattttaagtcagtgttcttctttagttgaagttcgcgagcttcttgaacgaattaatattgttaatactcctttcagcgagcaattaccattagcacaattacactggatcatttctgatgagaatgagtcaattacggtagaatctatgtcagatggtttgcatatttatgacaatccagtaggagtgcttacgaataatccgccatttccacagcagatgtttcaactaaataattatatgtatttatctcctaaacagcccagaaatactttctgcgaaaatttggctcttgatgcatatagtagaggtatgggaggattaggtcttccgggagatctctcatcttcctcacgctttgtacgtgtagcttttacaaaggtaaatgcaatttcaggtgaatcagaggaagaaagcgttagccaattcttccacattctcggatctgtggatcagcaacgaggatgttgcgaagtagcggatggaaaatatgaaatcacattgtatacgtcgtgttgtaatgttacaaaaggtatttattattacaatacttatgaaaaccatcagatcagtgcagtagatatgcatgtagaaaatctggatagtgataaaatgatttgttatccagtaattcaaggagaacgaatcaactatcaaaataaataatgttttgaaatcagggatgaggtagaaaggaaagttccatgacaaaagatgaagtaaaaaaactcaggatgaacagtccggaatcactacagtttttaaataatgctacaaaattttataatttaatgatgatgtatcgttgtgctattagggagatacaaactaaacttgaggttttggatgatgaattttcagttgagaacaatcgaaatcctatttcttttataaaaacaagaattaagcagcccaatagtatttacgataaattgcagaagatgggatatgaatttacaatagaaaatatacagacatatctcaatgatgtagcaggcgttcgaatagtttgtgcgtttattgacgatatttatatgatatcagatttgattacccaacaggatgatattaaagttattgaaataaaagattatataaaaaatccaaaatcgaatggttatcgaagctatcatatgattgttgaaataccagtattttttgctaagggtaaaacacctatgcgtgtagaattacagattcgaaccaatggtatggatttctgggcaacattggaacatcaacttcgctataaaaaaggaattgaagaaatgcctggctatgatgagataagtgaagaattacttcattctgcaagagctatcattgaagcagataatgaaatgcagagaataaaagacaaaattggtatgttccacgaaatttagggagaaaactgagcaagtaggaaggtggaatatatatgaaacaagatactttagagggcaaagcaaaaacaaaaaatggggtaaaacggctgtgtttttccataatctgcattcttctggaagtgatttttattattactatcgtaacacgcttgaatgaatatgcagaaatcataaatttatttacaaggattttgagtgggatcttggttttgggattgtacgcatcaaataagacatcctctatgaaaatgccttggatcatcttaattctaattttcccaattatgggtgtaggcctgtatttgttgattggtttgaatggtggcacacataaaatgcgtgagcgatatgcagaaattgatagcaaattgttaccaatgcttccggacagtcaggagtgtttgagcaaaataaaagaaacaattccgaaagcaggaaatatagcaagttacatacaaagaaattcgcagtatccaatctatcagaatacggatattgtgtattttgatgaagcagtgaaaggattagaggcacagcttaaggatttggagaaagcacagaagtttatctttatggaatatcatgcgatagaagacgctgaagcatggcataagattcaagatgttctggaagagcgagtaaaagcaggtgtggaagttagagtattctacgatgatatgggttctataggctttattaacacagattttgtgaaaaagatggaggcaataggaattcattgccgtgtattcaatccgtttatgccaggtttaaatctgtttttgaacaatcgtgatcatagaaaaataacagttattgatggaaaagtcggatttacaggtggatataatctagcaaacgaatattttaattacacacacccgtatggacagtggaaagatacaggtattcgtttagaaggagatgctgttcagtcgcttacggtgacatttttggaaatgtggaatgcagtaagtgataaggttgctaatgattctgattttagtaaataccttttccactatgattatgcggcacagccaactgggtttgttcaaccttatgcagacagccctatggataatgagcaagtcggagaagaagtttatatcagtatgataaataaagctgaaaaatattgttggtttatgactccatatctaatcataacagatgaaatgacgcatgcgttatgtctggctgctaagcgaggggtagacgtaagaattatcacacctggtatccctgataaaaaattcatttataatataactcgttctttttatcatggattagttaaacatggtgttcgtgtttatgagtggactcctggtttctgtcatgcaaaaatgagtatggcagatgactgtatggcaacttgtggaacaattaatctggattatcgaagtttatatcaccattttgaaaacggctgttttatggcagattgtcaggcagttgtggaaataaaaaatgatctgataagaacgatgggagaatgtcgtgatgtgacagaccaatatcaaaccggacgaagtgcatatttgcgactgggacaattatttatgagattatttgctggattgctataagaatctgatgaaacgacctttcaaaaaacagttgatttagaagttaactgtttttgaaaggccgtttttgctatatctaacagtctgttgtacaaagaagattttgcatggatgaaaaaacaaaccttgttgaggttaaattgagttttccattgtattgtattgctaatgaataagaataagaaaaagaacagacaatgctgaatgcactggaaacaagaatatctgagtatagtatgtaagttcgtaacagaatgaaaggagcgattcaaatgagcaatttggaaaattatatgaaacagcaagcaattttttgtgaacaaaatgatagcattagtaagaatctgtattcagagtatggtgtaaaaagaggcttacgagatgaaaaaggccaaggtgtgttgacggggcttacaaatatttctgatataaaagcttttgaatatcgtgatggagtaaagagtccatgtgatggcgagttatcttatcgtggttataatataaaagatttagtaacaggaagtaaaggaaaaaggtttgtctttgaagaaggagcatatcttcttttattcggagaattgccaactgatacacagttaatggaatttcagggaagactatctgattgtatggaactaccgactaactttaccagagatgtcattatgaaagcacctacatcagatattatgggttctatgactcgaagtattcttacattgggctcttacgataaggaaaaagaaagtcttgaaattccgaatgtgctaaggcagagtatgcagttgatcgcagcatttcctatgttagcagtatatgcataccatgcttattgtcattatgaaaaaaacgaaagtatgtatattcatagacctgaaaaagatttatctattgctgaaaatttcctgcgcctattaagaccagatacaaaattcacagaactggaagcaagagtactggatatagcattattgttacatatggaacatggtggtggtaacaattctacattcactacacgggtagtaacatcttcaggttcagatacttattctgttatttcagcagcaatgtcatccttaaaaggaaaaaaacatggcggtgcaaatctgatggtaatgaatatgatggatgatattaaaagtcatgtgaaagattatgaagacgaagaggaaattgcatcatatctgagtaagattttgaagaaagaggcgtttgatcagaaaggacttatttatggaatgggacatgctgtatattctatttcagatccgagagaaagggtgttcaaaggctttgtagaacaactcgcaagggataaaggacgtgagaaagatatgaccctttataacaatattgagaagattgcacctaagttgattgcaaagcagcgtcagatattcaaaggagtaagtcctaatatagatttctatagtggttttgtgtatgacatgttgaatattccaagagaattgtacacgccattatttgcgatagcaagaattgctggttggagtgcacatcgcctggaagaattgataactacagataagatcattcgcccggcatataagagtctagtcagcaaaaaagaatatatagaaagagaggaacgataatatgggagcaggaaccagtgcagaggagttttttttaaagagcatcaatgttgaaagtatatttgaatttgtcgaaagaacagattatttgtttctttatagtataaaggaatgtgttgaaaaatcagactgtcatgaaggagtatatctttcagaagtggcagaatacatgaaattatcgattccagaaacatctaagatggtaaaaagtcttgaaaataaaggatatattatctggaaattagatgaaaaaaaagaaagaacataccttgttttgacgaacaaggcaattgaattaagtaattgtcagaaagaaaaaatgatagaagcttatgaaaaaatcatatcgaatatacaagaagatgacctggcagttacacggtgtacattgagaaaaatccgacagcttatggaagaaataaaatagtgattaatacaacggagtaagaaaagctccttcatatattagaataaaaatatgactgtttctttaaaaagaagccggtcatatttttttatgaaaaataaattttgttgaggttaaattgagattgactttgtattgtataagtatgaaataaaaaggaatcaggtgatgtacaatgaaaaagcataaaatatgtaaaatccttcttgttatactggcaatttttttatgtgtggctttttatgaattgctcggaatctgcgttgcatataaaaagcagccggaagtgtccaatacaaccaaaaaagaaacaaaaaatgggttatggaacgaatgcagtgaaaatacagaacgggcagtaatcatagaaaagaatccagaagcgcttttacaaagagtgcgtttgatcaagaatgcaaaaaaggaaattattctttctacttttgcatttcaatccgatgaaagtggaaaattgattttaggagcactgcatgatgcggcagacagaggtgtacatattcgtctgttagtagatggaatggagagctggattgatatggaaggaaatccgtatttctatggattatcttcccatgagaatgttgaaattaaactgtataataaggccaatccgttgaaaccgtggaaaatgatgggtagaatgcatgataaatatttgattgcagatggaaagagatatattcttgggggaagaaatacatacaattatttcctgggtgattttccgggacataaaaactatgacagagacgtgttagtggtttgcgatgaacctgagaaagaaaattcagttaaccagttgtcagagtattttgaaaccatatggaatcaggaagacagtggttattttcataacaataaaaaactggcaaatagaaaatctgtaaagaacgcagttttagagttgcagaacagctatcagaaatattttgaagagaataaggaaagaatctgcgagaccgattatacggacgaaacttttgagacagaaaagattacattagtgtcaaatcctattcacacaggttccaaagaaccagtagtgtggtatcagttgggagaattgatgaaaaatgcaaaaaatcgtgtgaagatccacacgccatatattatctgtaatgatatgatgtataatacatgggaggagattgcagagaacgtttcagatttttctatcatgacaaattcagttgcgaataatgggaatccatttggggctgccgattatgcgaaaaacagaaatagaatcttaagtacaggaattaatatctgggaatatgaaggcggttattcataccacggaaaaagtattctcattgacgatgatctgtctgtaatcggttcctttaatatggacatgagaagtgcatatctggatacggaactgatgcttgtaattcgcagtaaagatattaataaacagttggaagagggcatgatggaatatgaaaaagtgtcccgccagatattagaaggcggaacttataatgatccatatcatgtagagccaatcgaattaacaaagaaacgtcagagaaaaatatttttggtacagcatctgcttggatgggcaaggtatctgttttaataaggaggaaggaaaacgtgtttcaaatattgattgtagaagatgataaagaattaagccagctattccaaaaagtgcttgagaagaatggatatcaagtcaaaagtgcatcggatggagcacaggcattagaagtattggataaggaatatattgatctgatcatttctgatattatgatgccggttatggatggctatgaactggtgtcagaacttcgttcagcaggatatcagataccagtgcttatgatcactgcgaaaggttcctttgatgatatgcgccagggatttctttcgggaagtgacgattatatggtaaaaccggtaaatgtgaatgaaatggttttaagagtcggagcactgcttcgccgtgcacagatactgaatgaacacaaaattgtgatcggttcaacagagtttgattatgatgcaatgacggttacaactgataaggaaagtcttgttttgcctaaaaaagaattcctgcttttatataagcttgcagcttcgccaggcagaacatttacaaaacaacagttgatggatgaagtatggggatacgagacggaggcagacccacatacgatagaggtacatataggaagaatcagagagcgttttaaagataaccctgattttgaaatcgtaacaatgcgtggaattggatacaaggtggtgaaaaaataatggaacaaaagaaagaaaaaggattgcggatccggtcctgtctgactggtgcaatctggctggcacttgtattttcaacagtcatatctgctttattatttgcttttttgaatcatttttttaatctgccgggcagcatacctgtgcttggctggcttttgatttttaatacattgattgcagggctgatcacttcctttattaatgcaaagttactggaaccaattaccagacttagtaaagcaatgaagaaagtttctcagggagattttgaacagcatttggaaacgaacagccgtatagcagaagttggagaatcttatcaaagttttaacgttatgacaaaagaacttcgtgcaacagaggtgctgcagatggattttgtatctaatgtttctcatgagtttaagaccccgattaatgccattgaaggatatacaatgctgcttcagggagaagaactgtctcaggatcaagaggaatatgtagaaaaaatcttatttaacacccaaagactttccggattggttggtaatattttgctgttatccaagttagagaatcagaatataccaatgaaaaaaacagaatatcgtctggatgaacagatccgccaggcatttctttcattggaaacaaaatggacagaaaaagaaattggttttcaggtagaattggaggaagttaaatatactgggaatgaaggactttttatgcatatctggataaatcttttggataatgcgattaagttcagcccttcaaaggggacaattacgatgtttctgaaacaagaacaggattctgttaagttcattctggaagatgaaggaccaggaatagaggatgatgtaaaatccagaatatttgacaagttctatcaggtagatggatctcataaagcagaaggaaatggcctaggtcttgcacttgtaaaacggattgtagatagtgccggaggaacaatcaaagcagaaaaccgtgaatatggtggatgcagatttgttatagagctgccaaagcagaaagatgagattatatagttttaagataaattagaagatgggaggatttatatgacattttatcaggagttgcagttaaatcagacaggttctaaaaacctgttgaaaaagagtgaaacactaaaagaaaaattatatcatatgtgggtatatctggtgaagatagctgttacaatggcattttgttttttctttgttagtattttcagcatcctatttggaaatgagaacagcattgtaggtgtagtagtcttattatgtctcatggtgtttagaaatgcggatctggggatccacaccggacaatctacgatgcttttggctttgttctttgtaattatgactgtatgtccgcatttagcaaatcagttttcaccggtattgggaatgctgttaaatattgcggcactggctgtgttgattctgttcggatgccataatccattcatgtttaatcaatctacattggttcttgggtatctgctgctatatggttatgatgttacgggaaaaagctatcagatgcgattagtcggaatggctttaggtgcagcacttacctgcttcgtattttatcgaaatcataaaaacagaacttataaaagaaatctgaaagatctgatacaagaatttgatatcacttcttccagaacaaaatggcagatatgtcagattttatgcgtaccgattgtcctttgcattgcagaactttgtaatatgccacgtgcaatgtgggctggtattgcggccatgtccacgattttgccgtttatggaagatatgcactacagagtccgtaaaaggattgtcggaaatattgcaggtgttatatgttttacagtattatattttctgcttccttcgtcaatctatgcatatataggaattcttggtggaatcggtgtaggattttcagcacaatatggctggcaggcagtatttaacacatttggtgctttagccattgctgcagagacttatggactacaaggagcggttagtcttagagtgattcaaaatgtttttggtgttgtgtttgctttagcattttgtgttatattttattggtttatgtctaaaaaaaaggaaagtgaggtgaccgtacatgcagagtgaagtgaatcaggaagaaaatttgaatagaattattacggttcctaatcttctttctttttttcggctttgtctgattccggtaattatatggagttattgtgtaaagaaaaatcctctgttagctggtgaaatcttattgctgtctggccttacggatcttgctgatggatatatcgcaagaagattccataggattagtaatttaggaaaaatacttgatccggtggctgataagctgacacaggcagcgatgttaatctgtctgtttactcgttttccgcatgtgcttcttttaatcgcaataatggcaggtaaggagctgtatatggtagtcagtggatgtcttgtgatacaaaagacaggaaaagtacatggtgcagactggcatggaaagatagtaacctttttattatatggaactgcagcggtgcatattatatggttccacattacaccgatggtatcagatctgttgattggtttgtgcgctataatgatggtcatatcggtcgctctgtatattatccagaataccaggactcttaagggagagactgtataagcaattttatattgcaatgactagaaaaatatttaggagaatattgatgagataaagaaggataaaaacttaacctggatagaatcagaacagataatttttgcatggctggataaagacaatcaggttactccgttaacggacgagcaattaaatccggtatggaaaatactaaattacgaaacagggaaatatgaatctgttcagaaacacttccgagtatttgaagtgtagaagttttgtgatacaaagtgtaaacgtaagaaaaaataatacatttgcggtcaatttgttatcgacagttgaccgcaagcacggtataatagacatagatctaataagaaaaccaaataatcattactgtaaaatgtcaggtaatggtagtcatcatttataattggaaggaacaggttggctttaccctaatggtggaaaatccaccatttttccacccaaactgtaattcctcagatgaaaacaggttttcttatcttttctgaaattgacagaaaaagcagtaaaatcaaggctttgaatgactttgattgacatagaatgcaagctgttttctgtaccaggatgaactcctaagcgaggggtcggaggttcaaatcctcttatggacgggcttcaaagcgttcgaaatgttagctggattagctgacaacgaacgcttttcttattttctgatcacgttcgtgtaatgattttccacaaaaaagaagtattttttagctaacatttgggtttcgttctggtgttatcccttattcagagatataaaaatactcagaactgaccgatgaaagtgttataatacgaattgagtgcaggatgcaaaacaatgtatatgaagaagaaagagtaatcgtagatttttacttataagaggagaatcagctatgcagcaggaatttattacagtaacttttaatcgtactaagattgctatccggtgtgcagacattctttatgtgatcatgtcagatgatcattgtacgattcatatgtttgatggaagtgtttatcgttgccgaatgacactgaaagcattgaagaagcagttgaatgaagggtttatggaggtaaaacgtggctgtatgatcgctgtgtctgcaatcagtaatattggagataaaattttactgtctaatggagaggaaatctgctatacaaagagaaagaaaaaggctctcagagaagaactgcagaaaaaacaggagcttatgattgcaaagatcagtaaaaaaaagctgccgctgaccccggaagaatatggcaaatattataaaatatgtgatagtctcccgtttgcatttacggatatagaaatggtatttaatgaagaaaaaaaggcagtggactggatctttcgatatgggaatgaagccttggctacactggaaaagctgccgttggacaagatgatcgggaattccttttccagccttttctccaatatggacgcaaaatggcttcatgtttatgaacgcgccaccttgtacggtgaaacactggaaatcatggactatagtccggaaatagataccaatctgaaaattatatgttttcctacatttccgggacactgtggatgcattttatttaatgcagaccaaatgaaatctataagtgaagaaaatcatctggtcaggttggctgcagttgctttgaaaagtaatcccactatataaagaaatattataaaggaatgttgttttaccgcttatcgtgttgatttaccgcaataaaaatgtcatttcgcaacagcttgatgatttcctgattgataatcctattgattgttactgcataaatgaccgttccggtctgaaagtgaaagatgatgattccgttgatgttattctgtctaaggatgcaccggaggataccacaaattggcttcctgtaggtgacggaggtttccatctgtatatgcgtatctatacgcctgatatggaggccctggagatctggacagtaccgaccattacagaaattgatccatcaaaggcgaattaagtattttacgcctaaaaaaatatgaaacaaaaataaagctccctgtttgtgggggctttattttcgttttatatttttagagtttctcagtattttgatgttttttacgattggctaataagtgcaattttattttttatattctcacagggaaatatgttatttattctttatggaatattaacattgacactttgcggaggagatgcttttcatctggtgccaagaattataagagcagtgcgtggaattaatgataaaataaagagacagctgggaattggattgcaggtatcgtcaattacaatgacagtattttatattattctgatgtatatctggaaatttacattcccggaatttgaaataccggtaataattaaagctatcatatggatatccgcagttgtcagaattgtgatatgtatgtttccgcagaataactggtgtacagatgaaggaaatatgaaattatctattatcagaaatgcagtctttgcagttaccggtataggggtaattatcctgtatttaatttcaggaaattggattcaggtctaaaaaagaacttttctcatacaggtatatgatttataatcataataaaaggaagatactatagtaattcttgtaaataatgtatattgattcagctcatcagaacatgaaatcctgttgaactgtcttaaatgcattaattaagaggattgttaaacagtggcaaccgatgtttcacgtgaaaacgaaaaggatgggatgattatgaaaaattactcagaagatgtaaacagacagtatcatattcaagtggcaaaaggtgaagtgggccgttatgtgatccttccgggagatccgaaaagatgtgtaaagattgcacagtattttgataatcctgtgctgatcgcagacaacagggaatatatcacttatacaggaacactggatggagtgaaggtcagtgtaacgtcaaccggtattggtggcccatcagcgtccattgcaatggaagagctgtatcgctgcggagcggatacttttgtcagaatcggaacctgtggtggaatgcagacggaaataaaaagtggagacattgtaattgcgacagcagcagtacgtatggaaggaacaagcagagaatatgcgccaattgaatatccggcagtggcaaatctggatgtgaccaatgctcttgttgaagctgcgaaggagaaaggatttatatatcatacaggtgtggtacagtctaaagattctttctatggacagcatgagccggaagcaatgccggcaggttatgagttgatcaataaatgggaagcctggaaacgaatgggatgtcttgcttctgaaatggaatccgcggcacttttcatcgtagccggtaaactcagggcgaggatgggttcctgtctgttggtattggcaaatcaggagagagagaagctgggtcttgagaatccggttgtacatgacacagacatggcaatccgggtagctgtagaggcaatccgcagaatgattaaagaagatcagggacaagttctgtaaggacggaggtgacagagaatgcagaatctggaaaaatcaatgatcagcaaactgattgagactgcaatggaacagctcaaattttcttatacaccctattcaaattttaaggttggtgcatcattacttacaaaaaacggacagatttatacagggtgtaacattgaaaatgcagcatatacacctacgaactgtgcagaacgaaccgcaatttttaaagcagtgagcgaaggcgtcagggagtttgacgcaatttgtattgtgggtggaaaagatgggattttgacagagtatacagctccctgtggtgtctgccgtcaggtaatgatggagttctgtgatccggagacatttcggattattctggcaatagataaagagcattatgatatctacacactgaaggatttgctaccgctgggatttggactacgaaatctgataaattcccgagaaatataaggtaaacgcccatcattgcaagtgatttttaattgcgaaaagtaaaaaaagtgaatgacgaataaaagggaacaggaaaaggtcagcgattaataaaatgtaagagaaggagtaaacataaatgaaaaattacgacagaatttttgtaattgtacttgattctctggggatcggggcaatgccggattcagcaaaatttggtgatatcggggtggatacttttggacatattcttgagaaaatgggttctctggagattccaaatcttagaaaactgggaatgctgaatcttcatccggcaggaaaaatggcgggtgttgagaatcccaaggggcgatatacgcatctgggtgaagctagcaatggaaaagataccatgaccggacactgggagatgatgggaatcaaaacagaaaaaccatttaaaacctttacagaaacaggattcccgccggaattgatcgcagaactggagaaaagatgcggaaaaagagtgataggaaacaagagcgcaagcggaacggagattattgaggaactgggcgaagaggagattcagacgggtgcaatgattgtttatacttcagcagattctgttcttcagatttgcggaaatgaagaaacttttgatcttcagaatctgtaccgctgctgtgaaattgcaagagaaattaccatgaaggacgaatggagagttggcagagttattgcaagaccgtacattggtaagaaaaaaggtgaatttaaacgtaccagtaaccgtcatgattatgcattgaaacccaccggacttaccacgttaaacgtgttgaaagatcatggatttgatgtgatcggtgttggaaagattcatgatattttttgcggagaaggcattacagaaactcatcattcagacagctctgtacatggaatggagcagacaattgaaatctgcaagagagatttcagagggttatgttttgttaatcttgtagattttgatgcattatggggacacagaagaaatgtggaaggttacggaaaagagattgagaaatttgacaaaaatctgggtgtgttgttagaagaaatgagagagaatgatctgcttattctcactgcagatcatggaaatgatccgacttatacaggaactgaccatacaagagaatatgtaccattcattgcttactcaaagagaatgaaaaatggcggtgcgataaaagacgaagatacttttgctgtgatcggtgcttctgtggcggagaattttggagtgccaatgcctgagggaacaattggacattctgttttaaaagagttaatgtaataacgattgtaaaaaaagacaggaatattgaaaacaggcgttttcaatctcctgtcttttgtgctaaaataggaaaagaatttatctgactaaatcgttaaagagagacaagtgataaattgtaaaaagataaaatgatacagaaaggaaacagtttttatggaaacaggaacaatttttaaatttcataatgacctggatacagaccagatcatagcatcacagtatctgctacttcctaatctggatgagatgaaaggtcatgcatttgaatctctggatccggatttttcaaagaaagtaaaaccgggagatttcgtggtaggtggagaaaactttggatgtggttcttccagagagcaggcgcctggtgttctgaaagcgttgggagtacaggcagttgtagcaaaatcttttgctcgaatcttttacagaaactctattaatattggtctgccggtaattgtctgtaaagatcttccggacgaagtaaataccggagataagatggttcttcatatgtcagagggaacagttgaagctaacggaaaaacatattcctgtacaaagcttccggaatatatgcagaatattttgaatcagggtggtctgatcgcatctctgaacaaggaggagaagtaaaatgggaatgacaattgcagaaaagattattgctgcggcagcaggtgttgacagcgtaaaaccgggagatatccatacagttaaactcgatcgtctcatgagtaatgatggaaccacacatcttacggttgatatgtataacaataaattgaaaaatccgcacattgcagatacaagcaagctggtgtttatcgtggatcataatgtaccatctgatagcccgaaaacagcagcatctcagaagaagatgcgagattttgcaaaagaacataacattgatttctgggaaggaaaaggtgtctgccatcaggttatgatcgagaattatgtccgtccgggtgaactgatctttggtgcagatagccatacctgttcatacggtgcattaggtgcatttggaacaggcgtaggatgtacagatttcctttatggtatggtaacaggtacttcatgggtactggttcctgagagcgtaaaatttaatctgacaggtaaacttccggaaggagtttacgcaagagatttgattcttacaatcattggggaaatcggagcaaatggatgtaactatcaggcaatggaatttacaggcgagggtgcgaaaacactcagtatcagtgatcgtatggcgctttgcaacatggcagtagaagccggtgcaaagacaggtatctttgaagcagatgagaaagctattgaatatctgaaagaacatggacgtgagccaaaggctgtatatcacagtgatccggatgcagtttatgcgagagaatatacatttgatttatcaaaagtccgtcctgtagttgcgaaacctgattttgtagacaatgttgtgcctgcagaagaagcctgcggaattgaaatcaatgaagcatttctgggatcttgtaacaacggacgtattgaagatctgcgtgtcggtgcagaaatcatcaagggcaagaaggttgctgagggcgtcagatttctcgttgtgcctgcaagccagactatttaccgccaggcattaaaagaggggcttattgacacgtttatggaggctggagccattgttatgaatccgaactgcagtgtatgctggggaagctgtcagggtgtgatcggtgagaacgaagttctgatcagtacaggaacacgtaatttcaaaggtcgtgcaggacacccaagctccaaagtatatctgggatcagcagctactgttacagcatctgccattacaggaaagattgcgctggcaagtgaggtgtgatgctaattataaatgtttcacgtgaaacatttaaccgaatcaagtaaatttcctgcgaaggtcgcgaaaagcaatagacagtaggtggagatttgtttgtatcaggaggagagcaagctcatcctgataaactgcggagtagttattcggtatggtatagagtcgcgtagcaaagcggatattcacaattcgtttgaatgaattttaacttgtgactgtgaaagtactgaacagttacaagtgaagatagaagataagaggtaagattatggaaaaattcacaggaaaagtgtgggttctggatgatgacattgatacagatattattattccaacagaatatctcgcactgaaaacaatcgacgatatgaaacagtacggattcagtcctctgcgtccggaactggcaggacagattcagaaaggcgacattattgttgcaggaaagaactttggatgtggttcttccagagaacaggcaccggaaattatcaaagcactgggaattcagtgtgtaattgccaaatcttttgcgagaattttcttcagaaattctattaataatggtctgttactgatcgagcagccagatcttcatgatgatatcaaagaaggtgatgaaatcactgtggtaatgaatgaacatgtagattacaatggaaaacagtacccgattgcttctcttccggaaaatctgatgagcattattcaggctggcggacttgtaaaagccatgcgcaaactgaatgggctggattgatttggaaaggagaggaaaatgggcgagacagttattgagaaaattataagaaacaatgttggaaaaacagtaaagtctggagacattgtaacggtcaatgtagacagggttatgattcatgatatatttattccatttgtagcagaaaagtttgaagaaatgggctttacgaaactctgggatccagataaagcagtactcatatatgaccatctggttcctgcaagtcagttagatgataccagacatttccatgcgggagatgcttttgccaggaaatatggcatgaaaaatgttcacagaagtgatggaatctgccaccagttaatgacagaggcaggttatgtaaaaccgggaaatattgtatttggtacagacagccataccactacctacggatgtgtaggcgctttctcttccggtatcggatatacagagatggcaagtattctgggaacaggaactatgtggatcaaagttcctgagacaattaaggttgtgatcgagggagaacttccgggaaatgttatgtccaaggatatcatcctgcgtctgatcggtgatctgggagctgatggagcaacatacagagcacttgaatttaccggcagtacagtaaagaatatgacagtagcaagccgtatgactatggcaaatatggcgattgaggcaggtgcaaaatgtgcgctgtttacaccggatgaaaaaactgcagaatattgtgatatagagttgaatgagttccagaagagccttacaggagatgaagatgcaacctatatgaaaacaatcacttatcgcgcagaggattttgtaccggttatggcatgtccgtctcaggtagataagattaaaaatgtaagtgaacttgaaggaacagaaatagatcaggtatttatcggttcctgcacaaatggccgtctggaggatctcagagctgcagcggaggtgttaaagggcaaaaaggtagcagattacgttaaattgattgtaactcctgcaagccgtaaaatataccgtcaggcaattgcagagggaattatggatactctggcagaggcaggtgcaatgatcacacatcccggatgtggattgtgctgtggacgtgcaggaggtatccttaccgatggtgaacgtgtagtagctacaaataacagaaatttccttggtcgaatgggaacatctaaggtagagatttaccttgcatcaccaaaaacagcagcagcgtgtgcaattgctggtaaaattgtaaatccagagaaataaaacggacgataaaacgaatgcgacataaatcgtacagataagcaacaaaactacagaataacaaaagaataaaattaacggataagtccactgcattatttataaaaggagtaagcagtggacttattttttgtcagagaacgacactatgatatgtttcatatcacataataaatcatctgacgggataataaggaaagaaaaggcgtggaaaagtctgtaaatttgattgcatagaaaaagtttctcagacagaattgtccaatgtgagtctgatctccgacgaaaacatgtgctttttgaacttaaaattgaacaaacagaatctgcgaaatgacaagaaagccgcataaataaaaggaatttcaaaaacatcaaaacctaaattgaacatatattgaattaaaataagaaaagctaaattctggttcaatgtatggttcaaaatataaattaaactaattgaaccaatgtaatgaaaacaatcaacatgttcaatatagttcaattaataatgaactataaaataaactaaaagttgaactttactgatgaaattgaaaataataaaatttaccgttgaattattagttcaattatagtataatagcaaagaaaaaaacttgaaaaagctgataaaatgcgggatttaaaaatgaacaaaacatatattcgcgtatgatactgaaagaaatacatttgaacttaattaatgtttggatgcctgtatgtattttgattcccgtataaacaatataatatatttgttctttctataacatatatgcgaaagaattaagaaatataacaataaccattgattataacaatataatttgttttttacagagaacggagatagtatttatgaataatatatttgctgaacgattaaaaaaagcaatggaacagaagaatatgaagcagatcgatcttgtaaaaaaggcggcagagcagggcgtgaaacttggaaagagtcatgtgagccagtatctgagtggaaaaacaactcccagatcagaaattcttaattttctggcgacaacattaggagtagaaactgaatggctgaaaggaaccgatgtatctgtagacactttaaagaaagagacaaatgaggcaggatttcaaatggaaaatatgaaatttgattacaattataataatatgaaagaaaatgacagagaggcagttgaggaagcacaggttcgtgaatttaaaaaatcgtctaagctgaataatgtgttatatgatgtaagagggccggttgtagaagaagctgcacgtatggaaaatgcaggaactcaggttttgaaacttaatatcggaaatccggcaccgtttggattcagaacaccggatgaagtgatttatgatatgagacagcagttgacagagtgtgagggatattcccctgcaaaaggtttattttctgccagaaaagcaattatgcagtatgcacaattgaaaaagctccctaatgtatctattgaagatatttatacgggaaatggcgtcagtgaactgattaatctcagtatgtcagctctgttagataatggagatgagattttgattccatctccagattatccgttgtggacagcatgtgcaactttagctggtggaaaagcagtacattatatttgtgatgaacaggcagaatggtatccggatatggatgatatcagaaagaaaattaccagcagaacaaaagcaatcgttattataaatccgaataatccgactggtgcgttgtatccgagagaggtattacaacagatagtagatattgccagagaacatcatctgatcattttctctgatgaaatctatgaccgtcttgtaatggacggagcagaacatatttccattgcttcaatggctccggatttattctgtgtaacgttcagcggtttatccaaatcacatatgatcgcgggctttagaatcggatggatgattctcagtggcaataaggcagttgcaaaagattatatagaaggaatcaagatgctttctaatatgagactttgttctaatgtaccggcgcagtcaattgttcagactgcattgggcggacatcagagtgtggagagttatattgttcctggtggacgtatttatgagcagagagaatttatttataatgcgctgacagatattccgggaattaccgctgtgaaaccgaaagctgcattttatatgttccctaagattgatacaaagaaatttaatatcgtaaatgatgagaaatttgcattagatttattaaaagagaagaagattctgcttgtacatggcggtggatttaactggcatcagccggatcacttcagagtggtttatttaccaagaatagaagtattaaaagaagcagccggcaaaatcagagattttctggaatattaccagcaggaaatataatctgtcagtgagaaatgggtactatgtttcacgtgaaacatagtacccatttcctgatattataaaaacttttggttaaacggataaaatcatccattttgctacgcagctctacaccgaataactgtttcgcagtttatcagaaggagtttacacttctcctgatacaagcaagtcctcacccattgcttattgcttttcgcaacctccgcaggggacttaattgattcggttaaattgtggaattactacaggaatacaatatgtttgtttcacgtgaaacataatgtgccgacaagattgtccaagaatctgttcactggtaatatcccgcgaggtgttttttgtgagcgaaggtcacagaaaacccaagacataccgcgcgaatttatgcgattagcataaattaagtttgcgaagcaaacgatactccttgggcattgcacaaggaggttcatatttcctgcatcgcgaagtgtgttgctgagaacggagtgaacagtaaccaagaatcaaatagtgacaaaattttataaaaaattaagtggtgaataactatcagatgtgataaactatgtttaatgcgttatttgcgaaatagttattattctgataacagtaaatgaggttaggtttaaaagtattttgcccctgatatcatcaaatgatgctgtgatataaatttctggaggtatgacgaaaaatggaaaatgaggaaaaaaaccagacagaacagtcagacaaaagcaggtctgtgtggagggagttgtgggactatgcaaagattatcattgcagtctttgttatagcgtttctgttgggacactttgtatatattaatgcacgagtgccgtcaggttctatggaagaaacaattatgacaggtgacagagtatttggaaatcgtctggcatatataaaagatgatccggagagatttgatattgtaatatttaaatatccggatgatccatctcagctttttgtaaaacgagtaattggtcttccgggagaaacagtaaacattgtagatggaaaagtgtatatcaatgattccgaagaaccgctggatgacagcttttgtccggaaacaccggaaggaagctttggaccgtatacagttccggagggatgttatttcatgttaggagataacagaaaccacagtatggattccagatactggcaaaatccgtttgtagaggaagatgcaatagaggcagaagtagcagttcgttactggccgttaaataagataggaactgtaaaataatcgtgacggttccatattttcaaaagtcaagcggataaaatcatccgcttcgctacgcagctctacaccgaataactgcttcgcagtttatcagaaggagcttgcacttctcctgatacaagcaagtccccacccactacttattgcttttcgcaacctccgcaggggacttacttgattcggttgaactgccgggtggttacaggtagtttggaaattttataaaagactgttaaaatcaggaaaatcacatattagtgtcctgattttgacagtcttttgttgtctgtggatttttcaaatgttatactgtaagacaggaggaaaatgaagaaaatggaatactggatagttacaacaatttcgtaaaatgtaaaaagagaaaggaagacgaatatgaaaagatggaaaaagtttatagcaatgggactggcggtatctatgatagttccgtcttgtataccgcagacattgtgggcttcagagttttcggcaggaagtgttgaatcagcagcagatgtttttgaagatggtgccggatatgagacaggaagtgagtcaggaaataaaatatctgatgagaataacagtggagatgagtttggaacaggagagttaaaagatcaggaaccggaacagtcggagacagaagattcagtaaatgccggacagagtgcggaaggttataacattctgctttacagtgatggtaaactggaaaaaacatatgtgataccctatgcagatgcggatactgctaaagtaccggaagcactgaagggaaagacaggttacatttttaaagagtggaatacgaaagaagatggaaccggtgaaacttataaaccgggagattctattaagaaacttcttgaaacagcagatatggcaaagcaggctcaggaaaccagtgagaggacagaagccggagaagaaataaaaccagaaaaagatgtgatgcaggaagaaaatgatgtggcacagacggacagcgcatcatgggaagaaaaaactgataaggcagaaatgcagatatcagacacagaaaatgatggaacaagcccggatatatctacagataaggctattgcagcaggagatacaacagcaataaccctgtatgcaatctgggagaaagcatccgaatataaaatcacatataaacttaataaaggaaaaaataatactgctaatcccaaaacttatacttcagaagatgagattaaatttaaaaagccgacgcgttccggatatcattttgtgggatggtatacagacagtaagtataaaaatcagataagtgtgattgaaaagggttcagaaggttcccttactttatatgcaaaatggacaaaggaaatcagtccttcggcgaaagctgcatcactggattatgtaaaaggaacaaaggtgaataccatcactgtatccgcaactgtttcaaattatgtgaaaagttcggatggttattactatctggtgtatgtagattctaattccggtaaagtgaaaaaaacggtgggtaaagtaaagaagccggagaaggcaaaagggaagattacatttaagctgaacatttccggacatccggaatatgcacagggaaaatttgccatagggataaaaaaatctaaatctgcgtatagtgtgatcagtccgaaaagctatgtcagcaatccggagaaactcagtacaaatacagcagcatattttgttccggggaccaaaaaaggaattcaggctacagatatcaacgagctgacagatacaaaatccaaaacagtattttttaacttatatatttcagacctgatgcgaaaagacagtggtgtggaaacatataaatataatgggaaaacatatcattttaatggtctgtacggatatgtatatcttgttcagcaatgtaatgcaaagggaatccaggtgactgcacagatcagtattgacaggaatgccagtacgcagagctttattacgggaaacagtccttatgcagaaacagcttattatggatggaacacagataacagcacaactagacagactatggaagcaatgtttgcatatctgggagagaagtttggaaaaaataactgttatataagtaactggatcctgggaaatgaagtaaacagtgcaagtggatattattatgtagggaatgtcagtttttcaaaatttatctccatgtacagtgaagcttttcgctgcctttacaatgcagtgaaaagcagccggggaagttccaaagtatttatctgtctggataattgctggaatcagaaaaatgcctttactatctgctatagtgcaagatcaactctggaaagctttgcggcgaagatttctgatatgcagaaagatgtgaactggaatctggcatatcatgcatataatcagccgctttcagattcacagttctggtcaggtgcaaatgcatccatgtttaccagtgatgcgaacaccaccacgtttatcactatgcgtaatatccagacacttacagattatgtgaaaaacagatttggttccaatacaaggatcattctttcggaacagggattttcttccacttatggaggacaggcaaatcaggcagcagcaattgcactggcctattataaggctgcctgcaatccaatgattgatgcatttattataagaagctataaagatgaagcccatgaggtggctcagggattggcaatgggattgaaggatgccaatgggaaaaagaaaacagcgtataatgtctttaaaaatatggatagttccaattccctgaaatatacagaaaaggtactaaaaagtcaggttggaaactggaaatcactggttccgggatatagtaccggaaaaatttcctccatgtatcgaaagtgatgtaactgacagacaggactgattttaaaaattgctgtcatattggaaatgtataaaattgtcacaaattaaacacatttttcccacacaaagaacacaaatcattcctatacttagaagcatcaaaaggaaacagagataaataaatgacatagataaatgacatagattcatggagggactttattatgatgaacaaagataacagaaatgataaaatcagaaagattgcaaagaaaggtcttacattcagcttatgtgcagtacttgcaggaggactggcagcaggaagctttgagggagtaaataaacttgcaggatggagtggagccacaacggtagaagctgcttcaaataaggacgagacaaccctgacatatgcaaaatccgagaagaaggatgcagatgccagtgattccaaatcagataccggcaaagatacaggtagcacagcaaaaggaagccttgatgtgtctgaaatcgtatcagaagcacttccatctattgtatctattacaaccaagtcagttcaggaggtacagaattacttcggaatgtatggaatgtatggatatgcgccacagcagcaggaacaggaagtagagggcagtggttccggtattattgttggtaagaatgatgatgaacttctgattgctacaaattatcatgtagtagaaggtgcggatacattgtcagttgcatttacagatggaaatgcagtggaggcatccgtaaagggatttgatgaagagagagatcttgcagttgtatctgtatctctggatgatgttgaagatgatacaatggacgccatttcaattgcgaatattggcagttctgatgatctgaaggtaggcgagcaggtagttgcaatcggtaatgctcttggatatggacagtctgttacaaccggtatcgtaagtgccaagaaccgcagaatggattctgacaataacacagtaacagatggaagtgatgacagcagtgacggtgtaaacctgatccagacagatgcggctatcaaccctggtaacagtggcggtgctcttctgaatatggaaggcgaggttgttggtatcaactctgcaaaacttgcttctactgaagtagaaggtatgggttatgcaattgcaatctcagacgtgactgacattcttcagaatctgatgaatgagacatcaagagataaactggatgattctgaacatggtgtacttggaatcgaaggttcttctgtaagttctgaggcagttcagatgtatggcattccggcaggagtttttgtaaaaaaagtaacagaaggtggagctgctgataaagcaggtctgaaagcaaacagcgttattactgaatttaatggaaaaactgtttcaagtagtgatcagctgatcgaatatctttcctattatgaaccagatgaagaggtagagctgactgtgcaggttcctcatggaacaagttataaagaagagactgttaaagtaactctggatgagaatacagatgctgatgacagtgatgataacgataaagacagtaagaaatctaaaaaggattctaagaaatcctcaaaagatgctgatgaagatgtagacgaagatacagacagtgaggatagtatggactccgatgatacagaggaaagtgagaatccatttatccagtactttgagaatcagggatttttcagataataccggcagaaaataaaattatatgatatccggatataaaatctgtgatagtgtgtagtgatgcggatgatttcatctgcctgatatcagcactttcatatgtgagagaattacatgtgaaagtgctttattatgctatgggaaaccattccataatattcttatagcataataaagccctccgggcaaggatcacactgcggcgggttgattatatttttgaaaagattctaaggtgcttttgtgaaagagcacttgagaacagctatatggcgtgatataataatatcattgcgaaaacgcaggtttaacagtgtagatggggataaagaggagaaaaatatgacagtaaaagaatgttatgaacagatgggtgcagattatgaaggtgtacttggaagactgagaagtgaggttcttattaagaaatttgcaaagaaatttctggatgatggaagtttccggagtctgaaggataatctggcacagaaaaatggggaagaagcttttcgtgcagctcataccttaaaaggtgtatgccagaaccttggatttgataatctgtataaggcaagctttgatattacagagaagctcagaggaagagatactgaaggctgtgaagaacttctggcaagagtggaagagcagtacaataatacagtagatgcgattcatatgatggaagactgatgaaggcagcgatttttgatgtagatggaacgctgctggattctatgtctgtgtgggaggatattggagaacgttatcttgcgagtcagaatatcacagcggagaaaaatctccgggctgttctgcacaccatgagtctggagcagggagccgcctggatgaaagaaaaatatcagttggataagtccatttcacagattatagaagaggttctgaaaattgtaagtgatttttaccggtttgaagcactgttgaaaccaggagtgaagaaaactctggaatggtttaaagagagaaatatacagatgacagttgcaacatctggaaaccgggaactgacagaagcagcacttgcgagaaacgggattctggattattttgagcagatttacacctgtacagaaacaggtgcaggaaaagatgaaccgttgatctacctgaaggcagcagaatctatgcaggcagaaccgaatgagacacttgtatttgaggatgcgcttcacgcagcgaaaactgcaaaaaaagcaggatttgtggttattggtgtctatgatgaagaaaacaggaagaatatttccaaaatgaaagaagtctgcgactgttactgtgacaggatggatgcggcgattgagaatatatgtttgacaatataaagaagaggtttcgttaaactttgtggtaacgaagcctcttttttagtaagttgttagtaaattagtatcagcgtgtcattggcagattattattaattcctttgatcataagaatctggtgaagatcaacgattccgttatggaaagtagctgcatatgcggacaggtaaagatcccacacaggactatgatatatcttgaaagggagttagcgccacgggaaccagagatcatgcaccggatggatttacggggcattgctgggtaaggattgataatagatattatgatccggaagctgactgggctggctggatgacgggggtgtatggatatagttcttatccgatcaggcattatgttaaaaaggtttataatttcatgagatagaggggaagaagagctaagccccgcaagatcagctaaaagcatttaccgatcttgcggggcttagattttctaaagatcctgcaaatgtcgctcgataggaattattgggctttgctggcaattggctgtgactgggcggctgagggatggaatccaggtgtcagatgggatgaatgtctgatgtggactgggtggatcctggagtgtgtttgaaacatgttctaaggtggaaataaaaaagtttgtcaaattatgaaattaactgttgacagggactgctttcggtgttatattagttgagctgtcggaaataattgtttattagatagagacaatttaaatagatttctgaaataaaaaagaaatttaaaaaagtgcttgacaacttaaaacgaatatgttaaagtaatcaagtcgcttgaacagagccgacaatcacagatcagaagaacagttcggaaatccggaagagttcgaaaaactttgaaaaaaacttgaaaaaagtgcttgacaaagaaaaagagatgtgataaagtaaacaagctgtcgcaagacagacaaccttgataactaaacagtgaaacacatacgattctcgaaaattctttacatttttaagaacggtttgaaaaaccaaaaacagtaaaacgagagatagctagttgttatcttgagtgaatcaaacattttatcagagagtttgatcctggctcaggatgaacgctggcggcgtgcttaacacatgcaagtcgaacgggaaatatttcattgagacttcggtggatttgatctatttctagtggcggacgggtgagtaacgcgtgggtaacctgccttatacagggggataacagtcagaaatggctgctaataccgcataagcgcacagagctgcatggctcagtgtgaaaaactccggtggtataagatggacccgcgttggattagctagttggtggggtaacggcccaccaaggcgacgatccatagccggcctgagagggtgaacggccacattgggactgagacacggcccagactcctacgggaggcagcagtggggaatattgcacaatgggggaaaccctgatgcagcgacgccgcgtgaaggaagaagtatctcggtatgtaaacttctatcagcagggaagatagtgacggtacctgactaagaagccccggctaactacgtgccagcagccgcggtaatacgtagggggcaagcgttatccggatttactgggtgtaaagggagcgtagacggtgtggcaagtctgatgtgaaaggcatgggctcaacctgtggactgcattggaaactgtcatacttgagtgccggaggggtaagcggaattcctagtgtagcggtgaaatgcgtagatattaggaggaacaccagtggcgaaggcggcttactggacggtaactgacgttgaggctcgaaagcgtggggagcaaacaggattagataccctggtagtccacgccgtaaacgatgaatactaggtgtcggggagcaaagctcttcggtgccgtcgcaaacgcagtaagtattccacctggggagtacgttcgcaagaatgaaactcaaaggaattgacggggacccgcacaagcggtggagcatgtggtttaattcgaagcaacgcgaagaaccttaccaaatcttgacatccctctgaccggtctttaatcggaccttctcttcggagcagaggtgacaggtggtgcatggttgtcgtcagctcgtgtcgtgagatgttgggttaagtcccgcaacgagcgcaacccctatcctcagtagccagcatttaaggtgggcactctggggagactgccagggataacctggaggaaggcggggatgacgtcaaatcatcatgccccttatgatttgggctacacacgtgctacaatggcgtaaacaaagggaagcgagatcgtgagatggagcaaatcccaaaaataacgtcccagttcggactgtagtctgcaacccgactacacgaagctggaatcgctagtaatcgcggatcagaatgccgcggtgaatacgttcccgggtcttgtacacaccgcccgtcacaccatgggagtcagtaacgcccgaagtcagtgacctaactgcaaagaaggagctgccgaaggcgggaccgatgactggggtgaagtcgtaacaaggtagccgtatcggaaggtgcggctggatcacctcctttctaaggaattggatacagtaggctgtgaaaacggctgaatcaatccaactaaaacggaagaagaagtagaagatcgaagatgtgttttactgttgagttatcaaggagataaaatttaatccttctggtgccgatgcggttgggggacacacccgttcccatcccgaacacgacggttaagacccaatcggccgatggtactgcactggagacggtgtgggagagcaggtgggcgccagattaaaaagaaaacaacaggctggaagcctgatgaagataaaacaggcattggaaagtgagtcctgttggaaacaggatggagccagatacgaatcgtaaagtccggtgctaacccgtatcagccgggaagagctgttaagatatgctggttttaccagtgattagagattttaaaagagtttaagatttctaatgactgataaagcatcagtcaatatgtaccttgaaaactgcatacatgaaatttgattaaaagttaatcaaatatccttgatacaaaacgttaagagatatgagagtatctcataaaacgcaagataggaagacatcgataacaaagttatcaaaaacaatgagaatcaaacgaccgcatcacctacgctagggtgatgaagcgaaaggtcaagcaataagggcacagggcggatgccttggcactaagagccgatgaaagacgtgataagctgcgataagcttcggggaggagcaaatatcccgtgatccggagatgtctgaatggggaaacccacatgagcaaacctcatgtatcctacagccaatacataactgtaggaagggaacccggggaactgaaacatctaagtacccggaggaaaagaaagaaaactcgattccgtaagtagcggcgagcgaacgcggaggagcctaaaccggaatgcgtgcattccggggttacggactgcatttaagattctttgaagctaacagaacggttttgggaaagccggccggagagggtgaaagccccgtacgtgaaagctgatgagactgagcaggatccagagtaccacgagacacgtggaaccttgtgggaaatcagggggaccaccccctaaggctaaatactacttagtgaccgatagcgcatagtactgtgaaggaaaggtgaaaaggaccccgggaggggagtgaaagagaacctgaaaccctgtgtctacaagctgtgggagcactttatatgtgcgaccgcgtactttttgtagaacggtccggcgagttacgcttactggcaaggttaagcacttcaggtgtggagccgtagggaaaccaagtcttaatagggccttaagtcagtaggagtagacccgaaaccgggtgatctatccatgtccaggttgaagctgccgtaagaggtagtggaggaccgaacccacatccgttgaaaagggtggggatgaggtgtggataggggagaaattccaatcgaacccggagatagctggttctcctcgaaatagctttagggctagcctcgatacagatttgcggaggtagagcactgaatttcctagggggcgtcaaagcctaccgaagaatatcaaactccgaatgccgcgtaatcgattatcgggagtcagactgcacgagataagttgggcggtcaaaagggaaagagcccagaccttcagttaaggtccccaagtgcgcgttaagtggaaaaggatgtgggatttcgaagacaaccaggatgttggctcagaagcagccatccattcaaagagtgcgtaatagctcactggtcgagaggtcctgcgccgaaaatgtccggggctgaaacgcgccaccgaaactaaggaaccgaaaggttggtagaggagcattgcatgcgggaagaagcagtaccgtaaggagctgtggactgcatggaagagagaatgccggaatgagtagcgagaataaggtgagaatccttatggccgaatatccaaggtttccagagtaaagctgatctgctctgggtaagtcggggcctaaggcgaggacgagagtcgtagccgatggacaacaggtggagattcctgtactgcggtatgacagaactgtggggacacgtaaggaaagcggaagccgggaatggaaagcccggtgcaagcggggtaccagccacttaggcaaatccgggtggcaatgggaatccgtgatgcggagcgaaataaagtagcgaagtccgtgagccatgcgtcaagaaaagccgctattgtttataccgtacccgtaccgtaaaccgacacaggtggatgaggagagaatcctaaggccggcggaagaagcattgtcaaggaactcggcaaaatggccccgtaacttagggataaggggtgcctgggaaaccaggccgcagagaataggctcaagcaactgtttagcaaaaacacaggtctatgcgaaaccgaaaggtgaggtatatgggctgacgcctgcccggtgctggaaggttaagaggagaggttagcggtaacgcgaagctttgaatttaagccccagtaaacggcggccgtaactataacggtcctaaggtagcgaaattccttgtcgggtaagttccgacccgcacgaaaggcgtaatgatttgagcgctgtctcgacaatgcatccggtgaaattgaagtaccagtgaagatgctggttacctgcgccaggacggaaagaccccatggagctttactccagtctggtactgggactcggtattgcatgtacaggataggtgggaggctgtgaatcagtaacgccagttgctgaggagccgctgttgggataccacccttgcagtattgggtttctaaccagccgccgtgacccggcggtgggacaatgccagacggggagtttgactggggcggtcgcctccgaaagggtatcggaggcgcccaaaggttccctcagaatggacggaaaccattcgaagagtgcaaaggcagaagggagcttgactgcgacaccgacgggtggagcaggtacgaaagtagggcttagtgatccggtggtattaagtgggaatgccatcgctcaacggataaaagctaccctggggataacaggcttatcactcccaagagttcacatcgacggagtggtttggcacctcgatgtcggctcatcgcatcctggggctgtagtaggtcccaagggttgggctgttcgcccattaaagcggtacgcgagctgggttcagaacgtcgtgagacagttcggtccctatccggcgtgggcgtaggatatctgagaggagctgtccttagtacgagaggaccgggatggacgggccgctggtgcatcggttagactgccaagtctacggccgagtagccaagcccggaagggataaacgctgaaggcatctaagcgtgaagccccccttaagatgagatatcccattcgaaagaagtaaacccccttgaagacgacgaggtagatagggcagaggtggaagtgcagcaatgcatggagctgactgttactaatcgggtgagggcttgaccaagaatcgcaggaagaatgaatctcaaggaaatgtcaacatgtatgtagttttgaaggtacagtaaaaaccagctatcatctagctggtttttttgtgtgcaaaaatctatagaaaggaatgtctgaaacttctgaccatttacatagaaaattatagaaagtgggattaaaaatatattgtcttgcaggaaaatgggttttaaaattataagcaagatttatagaatctattaatcctctaaaataatacatcttaatctagcccatcagagtgtgaaatcatgctgaactgtcttaaatgcattatttacgaggactgctataatagaaacatatatgggagggtttttcatgaagatttatgtaaatgtaaatgctggtcatgatggtaatggtacagaacagatgccgtttcgtcatattaatgatgcagcaaaaattgcacagccgggggatgaagtttgggtagctcctggagtttatcgggaatatgtagatcctgttcatgcgggtagagaggatgccagaattacttacaggagtgtagagcctcttggggcagttattaccggagcagaacgaattcagtcatgggttccttataaggaaaacgtatgggtatgccgtgttgcgaacagtctttttggcaactataatccatatacaactatggtatatggagactggtattttgctaaagctgacaaacatacaggatgtgtatatcttaataaccgagcactttatgaggctggaagtgtagaggaatgtattaaagccgaggtttatgagtgtagttgggttccggaggaatctacttataaatggtacacagaacaggatcaggaaaaagatgagacagtaatttatgcgaattttcatggagcagatccaaatgaggaaaatgtagaaattaatgtacgccgtgaatgctttatgccatcaaaaacaggtgttggatatatcacagtcagtggtttcgtagttacaaaagcagcaactacctgggcaccgcctgcagcttatcaggatggcatgatcgggcctcactggagtaaaggatggatcattgaggattgcgaaatttctaacagcaaatgtgcaggaatttctcttggaaaatattatgatccggaaaatgatcattattttactaataaatatgttaagagtccaactcaaatggaaagagacgcggtatgccgtggacagtatcatggctggcttaaggaaaaagtaggaagtcatattatccgccgaaacaatatccaccactgtgagcagggtggtattatcgggcgtatgggtggtgtattcagtattattgaggataatcatattcaccatatcaacaatatgatggaattgggcggagcagaaattgccggaattaaaatgcatgctgcaattgatgttattatgagaagaaatcatattcatcattgtactatgggaatctggtgtgattgggaagctcagggtacacgactttctcagaacctgctccatgacaatcagcgtccggcatttgctaaacagttgaaaggtggtatgatgtgccaggatatttttgttgaagtaggtcatggtcctactcttattgataacaatatccttttatcagatgccagcctgcgttttgctactcagggtgttgctatggtacataatctgatctgcggtgctttaacttgtgtaggcgaaggaaccagttggcgttatacaccatatcatatgcctcatcgtacagaggttatgggatttatgactatacttcatggagatgatcgtttctataataatattttcgtccagaaatggccttcagaagattttattacaatgcatgattctgatgatggatttgattctgaaaacagaaaagtcggaacctggatgtttgatgagtatccaacgtatgatgaatggatttcacagtttgattttacaaaacctgcagacatgaagaaactggaatcagttcattttgatcatttaccggtatggagtgaaggaaatgtttatcttaatggtgcaaaggcatggaaacatgagaaaaatgggttcgtttcttctgagaatgtgaaggtagaattaacagagaaagacggaaaatatttcctggatacaaatatatatgagattcttgaagatttctccggacgtatgatcaatacagaagttttgggaaaagcttttgagccggaagaattcttcgaaaatccggatggaacaccgataacatttgataccgattactttggaggacacagaggttccaaggtaattcccggaccttttgcagagaaggaagacgttgggaaaaacgttaatatatgtactgcattttaaacgaattaagtaagttatcggatacaattgtgaatctacgcctgagtgagcagtaatataattcgttactgttcactccgttcacagtaacgtagccaaaattcattccagattgcctgcggcaatggaattttggcttgtatgtctcgggattttggcatattcatgccaaaacacctcgcgggacagtggtgtgtgaacagtaactataattccaataacctttattttctctgtcttatctttctggtagatatggaaaatgtatgctaaaatagaaatagcaaatttgtatgtaaaataataaggaaaggtaagagggggaaatggagaaagaggaaaagcgtgcagatcaggagaatgacacggaagaacaaagtacggaagcgaaaagcttgctgaaaaaaaagcttcaatattatagtagtgagattcagcgtgatgtgggaaatcttgtaaaatggctgatgatcgcggtacttgtaggatgtattacaggagcggcgagtacactgttttcttttgtgctgaagagtgtgacaaattgcaggaaagaaaatgaatggatgttctatctgcttccggtgatgggattaattattgtatacctgtatgagaaatttggtaaggatgatggaggtacgaatcaggtgctttctactgtgagatcacaggacgatgtgccgattttatctgcacctctgattttcatttctacagcacttacgcatctggcaggtggctctgcaggacgtgaaggtgcggcaatacagcttggtggaagtattgccaatcagcttggacgttggattcatctggatgaggaagaccgacatgtaattgttatgtgtggtatgagtgcagcattctctgcattgtttggaacaccgatggctgcggctgtttttgcactggaggtagtcagtgtaggagtgatgtattatacagctttgatgccttgtatgattgcttctctggttgcatccggatttgcggcaggaatgggagttacaccggagacttttcatgtagtggatattccgaagctgactattgaaacgggtttgaaaatgggtgctatcgctgttggatgtgcagtgattagtattgtattctgtatggtgctaaatggagttgccggagcatatggaaggtggtttaagaatccatatgtgcgtgtagttgtgggatcctgtctggtgattggaattacattacttctgggaacttcagattatatgggcgcaggtgcagagctgattgagaaggcagtggaggaaggacaggcaagacctctggacttcttctggaaactggtactgactgcattgacaatgcgtgcaggattccgaggcggggaaattgttccttcgttctgtataggagctacattaggatgtgtgatgggaaactggctgggattttcgccatctatctgtgctgcatgtggaatgacggcggtattctgtggagtgacaaactgcccgatcacatcaattctgatcgcatttgaaatgtttggatttaagggagttcctttttatctgattgctgtttctatcagttatgcggcttcaggatactatggactgtataaggaccagacgattgtgtattctaagtataaggcaaagtatgtgaataaacctacgcggttttaaccgaaactgcagagcagttgttcggtgtagagatataaatagaaaataaggacagtttttcagtctaataagaatctgaaaaactgtccttatttttgttattctaaagccatgaaaagcgacagttgaggcagacagatttgtctattgaagaaatttctctgggtgtcggttatgaaaaccagagttattttttccggcagtttaagaagcgatatggaatgattccaaggagataccggatagaaaaaggacaaaaagtatgtaaacttttgaaaaattcagaaagagtcggtatgctttttacgttgcagggaaagagaataaatgttaaagtaaatgatacggtatagtggggcagggaaataatagagattatcctgaaaagtgttttattacaaaatagcagtgacagaaattatatcgaatatgtagagagaggatggagtttacttggaaaaagataatcaaagtacgcaggagataaattcgcaggcacagaatccgcttggtatagcaccggtaggtggattgatcgcgaagtttgcgattcctgcgatcatcagtatgctggtcagtgcgatgtacaatatcgtggatcagatttttattggacagggtgtggggatgctgggaaatgcagctacaaatgtggcgtttcctgttacaacggtcgcaactgcgctggcattgcttttgggaattggcggtgcatcaaattataatctggaaatgggggcaggacaggagaagaaagccagcgggattgcaggtactgcgttgtcgtcactggcaatcagtggtcttatacttgctgtgattgtactgatgttcctgaaaccacttctgacattgttcggggcaactgcagatgttatgccttatgctgttgattatacaggtattactgcatttggacttccattttatattttgtctgtcggcgggaatcatgtggtcagagcagacagaagtccgacttattctatggtctgcattatgataggtgcgattattaatactattctggatccgctgtttatttttggatttggatgggggattaagggtgctgcatgggcaactgtgatcggacaggttgcttctggagttctggtaattgtgtatttctgtaagttccgcaaaatgtatctgtccggtgggatgctgaaaccaaagctgtcatatcttaaagcaattatttctctgggacttgcatcctgcattaatcagattgccatggcgatcgtgcagatcgtattaaataatattctgcgttattatggagcaaattccgtatatggaagtgatattcccattgcctgtgtaggtgttatctccaaagtcaatatggtgtttatagcaatctgtattggtatttctcagggcagtcagccaatctggggatttaactacggagcaaagaaatatgacagagtaagacaggcataccgttattctgtaactgcctgtacagtaattgcaacgatattctttttctgtttccagatatttccacaccagatcgtgggtatcttcggaacaggaagtgatctgtattttcagtttgcagaacgttatctgaaaatatttatgtttatgacctttgcaaacggtatccagccggtatcttccggtttctttacttctatcggtatggcgaagctgggtattgtaatgtctctgacacggcaggtgatttttcttctgccattgattattatcttcccgttgtttatgggaattgatggagtgatgtatgcaggaccgatcgcagatgcagcggcatttgtgctggcaattgtgtttgcgagacgagaactgggaaagatgcgcagtgcggaaatagcataaaaaagttcccgcagataatatggaagaaatttgaccatattgtctgacgggaacttttttatgaaaaaaattattgataaattacagattataaaagattgtaaaactgatcgaacagctctgtctggaagcttccgggtccggagctgtttttctctgctctttctcctgctgtgccaaattctctggctgctgagacggcagctgtaaatgggtctgtaactgccagataggtggcacagatcattccaagcatacatccggttcctgtgatctgtgacatggcaggagtaccgtttgtgataaattcacacttactggcggagacgatcatatcttccttgcctgtgataagaagtgtggtattccattgggaagctttttcctggaaaagttctttcagatgggaacgattggcatctgtaagcacatcctgtacacctgcgtcaattccgattgcatgtgcggtctgtccggacatggcaagaagttcagacatatttcctttaaggagttcgggcatgtggatgttcataagcttctgcgcaaattcatagcgcagattgctgcaggcggttcctaccagatcaagcataacaggtatgtggagactggcagcgattttcagagattcaggcatggatttcatacgcgcatcggtgatatttccaagattcagtgccagtgactgagcatggctggtgatctcagctacttcagcaggatgttctgccatgatcgggcggcctccggccgccagaataatattcgcacagtcatgaatagaaatcggattagtgatgcaatgaatcagcggctgtgctgctctggttaattgtctgggatttgtctgatttacgatcatatacttttgctccaaggctttgttgaaatttggcaagcattcctgcgtgacttaaggccttcaggaagaagtaggcaatggtgccgcccatgcaggttgctgccagaaacattggtgtgtagaaaaatgcgttcagtccgcttctgcccataagaaatgccattacagggtaggaaaccagagagccgatgataccggttccgaagatttcgccgatcactgcgcagataatctttccatgagaagcgcggtagaaaacgcctgataaaaatgcgccgaatacggcacctgtcagtgcaagtggcgggatacccataaacatcattcggatgattccgatgagagtggcacaaagcaatgaataccacggtcccagaagtacggaacagacgatgtttatcaggtgtgcagtagggcacataccctcgattctcagaatgggtgagatgacaacgccgatggcaaccatcatggcgagcatgaccattctgagtgtttttgatctgtctgtgttcataataatgaacctccttgaaatgaagatttggtctgccgaagcagacattatcagttgtgcaggaaacagataaaatcctgcaaaaaaaatctgccggaataacacactggcagattttaatatacaaatacagtccctacgctggcattatccatatcaggtgcggtcgaagatcaatcttcctctcagcctgtctcacaggctcccgttgttattatccattatgcagattttctcttgttagagcgtatttgaaaaatgctttacgcaagatgtgcgttacaatttttcaaacacgctttagagtaacacaagcttttggaaaagtcaatgggatgtaaaagcagggtaaattttctacagtaaatttatactacctaatattatttttaagttgactttttatttttttcagcatatactaacagtagctaaggaatgtgacgagattccatgaagcgacctaaagaaacaaaagccctcagagttgcagctctgagggctttcttgctcgttacggtgagctgttccgtttaggctgttgctgtctaacgtctgccgtccagccatttgcatatgtagtagctaactgcacctgctaaaacagagacaagaaatgtgacgagaatttcttccatgaaactcacctcctttctgctggaggttcgacagctcttatagtatatcatggttactgttcactggtaatatcccgcgaggtgttttttgtgagcgaaggtcacagaaaacccgagatataccgcgcgaatttatgcgattagcataaattctgtgcatcgcgaagcgtgttactgagaacggagtgaacagtaacatatcatggcttaggacgaattggaataaaaaatctatttgtactaaaacgattgtccgtgctatgattaacaggtagatgacagacagcatatgataaaaagaagctgtctgcatggacagaaaggcaggttaaatctgatgaaacaggaaaattacataaagggtatgataatgatcatcctgtcggcgtttttctttgcttgtatgaatgtgagtgtacgtctggcaggtgatctgccgtctgtggagaagagtttcttccggaatctggtggcggcggtgtttgcagcggcgattctctgtaagaatcgtacagtgccgaaggtggataagaaatactggggaccgctgattttgcgttgtgtgtgcgggacactggggattctgtgtaacttttatgccattgatcatctgttggtggcagatgcatcgatactgaataagttgtctccgttttttgcgattattttttcattccttttgttaaaggaaaagatcagaccggtgcaggctgcgtgtgttgcgctggcgtttataggatgtttatttgtagtgaaaccgggatttcagaatgcggcacttgttccggcactgataggagtctgcggtggactgggggcaggaattgcctatacgatggtgcgtgtactgggaactcacggagtgaagggaccggttatcgtgttttatttttcatttttctcctgtttgtcggttgtgccgtggatgttgttccatttcacacccatgaatatgaagcagcttgtgacattgctgatggcaggattattcgcagcgggtggacagtttacgattacggctgcatacacctatgcacctgcagggaagatttccatttttgattattcgcagattatttttgccacgatgctgggatttatcctgtttggagagattccggataagtacagctttacaggatatgtgctgattattctggcatcattgggtacctttctttataatatgagggtagctaaggctggtaaatgaagaagaagtaaaaaaggatttttttgattttatcaagtaagtctgatgaaatccgatcagtatatagaattgttggattgtaaactataaaatagaaaaagttgtcaataaaaacgctttgtgttaaagtatccaatatgttaaaaaattaaggagaagggtgtacaaagatgtcttttataaaaaatattccactacgccctcaccatggaatgtgccttgcatatttcaagggtgagggatacagtgatgggttttccgcacatatgcaggaaatgctggatattttccagaagggagcgaagatacagcttcatgcagatacagacgagatctgttctgcctgtcccaataatgaaaaaggatgttgttcttccttttcgcttgtagaagcatatgacaatgcagtactggatttatgtggcctggagaatggacagattatggaatttgatgattttacagatattgttcaaaagaaaatcctggcatcaggaaagaggaaagaaatctgtgggaattgtcagtggaactccatctgtgaaagccagaagagcagatgggagaaatgctaagaaaaatagagttacagaatgaatagcgttccggtacagaacagaagctatgaataaaaaagtcagatgcgcaaatagtgcagtagaaaggacataacgataaaaatggaaaatacagaatcacgtttatatttcgccagtgactacatggagggtgcacatcctgcgatcatgaaaaagctgatggagacgaatctggagaaaacagtgggatatggtcaggatccatatacagaagaagcgaaagaaaagatcagaaaagcctgcaatgcaccggaggcagatgtattcctgctggttggcggaacacagaccaatgccacagtgatcgatgcacttttgaaatcctatcagggagttgtggctgcggatacaggccatattgcaacccatgaatctggcgccattgaatttggtggacataaggttctgatagtaccgcagaaagatggaaaaatctctgcacagcagattgagaagctggtgaaggatttctatgatgatgccaactatgagcatatggtaatgcctggaatggtatatatttcccagccaacagaatatggtaccctgtattccagagaagaattagcagctctcagcaaagtctgccgggaaaatcatcttcccctttatgtggatggcgcccgccttgcctatgcactggcaagtccggagaacgatgtgactctcactgatctggctgaatttagtgatgcgttttacattggaggaaccaaatgcggagcattgtttggagaagcggtggttataccgcagaaaggacggattcctcatttctttacaatcatcaagcagcatggagcattgcttgccaaaggaagaatcgccgggatccagtttggtgagctgtttacggacggactgtacctgcggatcggcaaacctgcaatggaagctgcagagcagatcaaggctgcactgaagaagtatggatatcagctttctctggatacgcctaccaaccagatcttctgtattgtgtctaatgatgtaatgaaagaaatagcccaggatgtggagttcggattctgggagaagtatgatgagacacactctgtgatccgctttgccacaagctgggctactactatggaagatacacagaaactgattcagattctggaaaaaaataaataagagaaaaaatcagtggtcagttgatttaaaggagtgttacaggcagcatcagggcaatggtgctgcctttttcgctgctctgggttacttttacctggccgttgtgctgtctggcaatctcgcttacaagggcaagacccagaccggcaccgcccatggcgcggctgcgggatttgtccacacggtagaagggatcaaagattttctcctgattttcaggggagataccgatgcctgtgtcagttacctccaggactgcagtctctgcagaatgaatgcctacagtgacggaaccggaaggccggttatatttgattgcattttcaaccagattatagactgcccggtacagaaggatatagctgcctgtaacagtacagtcaccttctgtctgaataagccggatctgatgcttttctgcaaccgggtccagatcgcagaaaacttcttctgtgagtgctgcaagggaaatggtatcagaacgctctacagtctgaagacctgtcatgtccagcagaatttccgcaaggtgggaaagccgtccggtctgttcctgaagcatggtgaaaagcctgtcgtattcctggtgtgtgtgttccggcttcttgtaaaaaacttccaaatttgtctgcattacagctaagggtgtgcgaagctcatgtgctgcacttgccacaaactgcttctgtgcagagaatgcattgtccaggcgggcaagcatgtcattaaaggatctggtcagacgtgagatctcatcctctgagagtgggacttccagcggttcagacagattctgagcctgtacctggctgatcctgtcactgaatctgcgcagaggggtcagggctcttctggtgacaaaccaggtacagatactgctgagaagaataatgatacctgtggcaatcatgctctggaacagaaatttatttttggtattctggatctggttttccagatcagggatgaggatttttggatctacattgatagagatcgggtttgaattgtcaggggtgaccagaaccacatagtcggaaatcccttccagaccggtcacagcagaacggctgataaagaaatacatcagtgcacaggctgtgataaccagcccggagatcagcaatgtgagccgccactggagagagagcctgcggggggaaagtttttctgaataaaatttcatagataaatcctttcgtttcattataatgacatagtagtatttgaaatctgaaaatatttattgtacagatatgaatgatttttattcttccagaatatatccctgtccaatcttattctgtataggatcatatccaagggcagttctcagttttttccttaaagaagaaatgtgcacccggatggagttactgaagctgtttacgctgccgtcccagagatgctcgatcatttcctcagggctgatgatccggttgcggtgaagcagaaagtattccagaagtgagctttcttttctggtgagagccagaggcgcgccatctacactggcttctcttgtgcgtgtgtcaaaggtaatgcggctgcatctcaggcagacatcctcctggataaatttacggcgggtaaggctgcggatgcgggcttccagctcctcgaaatgaaatggtttggtgaggtaatcgttggctcccagatccagaccctccaccttatcctggatctgtactcttgcggagagtatgagaacaggagtattggtattgaaggtacggaactgacgcaggatttccagaccgtcaattcccggcaggttcagatccagaaggatcaggtcgtaattctctgtcatacataattccagtccctcttccccgtcaaagcaggtatctgtttcatatccgtccatgcggagtccttctgccatggaacggcagagctgttcttcatcttctataattaaaatgtgcatgatagtctcctttttgaatttctagatttatagttttatcatagcacacgaagtataaaattcgtgtaaaaaaagaaaatgtttcatattaaaatatccgattacaaagttcttttaacaaccgtagcaagaattccctcacctctatagggacgccgctgaaaaactgttttttcatactatatacagtgtctcaaagttgattgatgtactttattttgtgttaatttatacgcaaaaaggactttttcagtggccttctataggtgatgggatgaattgcactatgaattgcacattcgagcatgtctgctcaaatttataaaaaatcacaaaacacttgttctgacacaataaatatattataatagaaaaaagaacaatatgctcttggaatttggacggtcgaaataagcaataagtgagtgtacataatgagtttagataataattctcattcagtgtttttgtttgattctggttatgaaatatagcagaaagatgctggacgataagatgtcagagagaacaaaagaaatctttgaaatatagcacctgttgaaacaatccatcagtatatagagagtcagggtgagaaagataaaccgggcagtaaaaataaggatctatccaaataaagaacagataacccagatagagaagacgatcggctgcagtcgttttctctataaccggatgcttgcggataagatccgtcattatcaggaagaaaaaaagatgctgaaaaatacgccggccggatataaaaaagaatatccatggctgaaagaggtagattctcttgcgctggcgaatgtacagttaaatctggaaggggctttccggaaatttttccgggaaccgggagtgggatttccgcattataaatcaaaaaaacattcgcggaaatcctatacaacgaatatggtaaatgggaatatctgtctgcaggacaggttcctgaaactgccaaagatgcagccggtaaaaataaaactccaccgtatgatcccggagggatggaagctgaaatcagtgactgtgagcagggaaccgtccggaaaatattttgccagcctgctgttcgactgtgaaaaccaaacagcggagaaaagacaggcggaaaaattcctggggatggattttgccatgcatgggatgtgtgtattttctaccggtgaaagagccggatatcccatgttttaccggaatgcagagaaaaagcttgcccgggaacagagaaaactttccagatgtgaaaagggcagccgtaactatcagaaacagaagaaaaaggttgctttatatcatgaaaagataaagaaccagaggaaggatttccagcataagctcagccacagccttgcagaagactatgacgcagtatgtgtggagaatctgaacctgaaggggatggccggaggcctgcatttcggaaaagggatacaggataacggatacggtcagttcctttccatgcttggatataagctggaagaacgtggaaaatatctgataaaagtagacagatattttgcatccagtaagatatgcagcgtatgcggacataagaagaaagagctggcattatcagaacggatatacctatgcgaatgtggaaaccggatggaccgggatgtgaatgcggcggtcaatattctgaaagaaggaaaaagaatatataaaaaatgtgcataatagcacagaaaagatccgtaaccggataaaaaagaaccgcgggacacgcggggatagcctgttttagctttgccctgaagggcaattgagcaggaagctcccacttcaaaatctgtaagatttaagtggcgagagcatgtcaccaagtttcagatttgtctgtgactggccatgaaataaaattttgaaaaaagttattttcttaacacagattttatttctcagatgctataatgtgtgcatatcaataaaacgatgcctgttatgcggggacaaaatccaaatctgcggacagacataaggaattaaccaattaaactgtgaagcagttatttggttaggagcaggtagagaagtgtatgtttttatcggcttggcttaaaagtaatataaaaatcataacagtaaaaaatgaagggagcttacttataatgaaaaacagaagaatgagattaatggcgatttttgcagcaggtgtattaagtgtgacatctatgggaggtattgtaactgcacatgcagaggaaactctttcagtgcctgcagaggaagccggtgcaggtgcggttcagatggatggaaaggatgctcaggcagcagaagatggcagtgtggcagcttccgagggcttgatcgcaggatctttcaaaccgtcagagattgctcagccggcacaggatacttatgaatatccattccttggaatgaaattagggatttccaaagatctgaaagagcagatggagaagaagaacatttccatgtttacagatgagagatggaatgacaatgcagatgcagtcacatatgctacagcaagctggtgcaccctgacagatgagcagaaggatgcagaggtggataagatgggcaccggatatgacgattggctgaaaagtctcagcagagtaggtgtgatcggaatgtatgatgaggaatcccagaaagatctggatacgattaccggctgtacagagcataaagaactgggtaccagtagtgatggcaaatataaatattatctcagcacaaacaaagatgcggatgcagacctgttaaaggacgtggaggggattgaagtaacacttacagaaatgaccccgttccagatgctttctgcatttgaccagccacaggatacttctgacagtacagaggcagctgaaggaacaaatgtaggcaaatttgaaacaacaggagttgacggaaaaacctatacacaggatatcttcagcaaatatgatctgactatggtaaatatttttactacctggtgttctccatgtgtcaatgagattcctgatctggagaagctttatcaggagatgaaggataaaggagtaggagtagtaggcgtgacactggatacagtaggcagtgatggaaagcaggatgaggaagcagtgaaaaaggctcaggtacttcaggagaaaacaaaggcatcctatccattcctgatcccggattccggaatgatgaacggacgtctcaatggaatctctgctttcccggaaacattctttgttgacaaaaacggaaatattgtaggtgagacctactccggaagccacagtctggacgagtggaaagagatcgtggaaaaagagctggagaatgtcacagagggaaaataaatgaataaattaaaaaccagcaaaatatggaacagtaaatggccggcgctgattcttatgcttgtgggagtctgctttatgggatatgggattttccgcggagagctggcagtggtgtttacaaaagccattaatatctgtatggaatgtgtaggaataggataaatgagtaatcaaaagaacagcgataacaaaagtaataagaaacaaaacacaaaaaatatgaggatcaatgagtggccccgccacggaatccaggcactgtgggcgttcattacaaacagtcatgttaccggctttgtcacaggcaaaatttacacaggcaaattgaaaaatgcctgtgttccgggcctgaactgctattcctgccccggtgctgttggcgcctgtcctatcggttctcttcaggctgtgatagggagttggaatttcaagatggcttattatgtggtgggatttcttatcttcatcggagctatggtgggaagactgatctgcggttttctctgtcccttcggactgattcaggatctgctgaataagattccatttcctaagaaaattcgtacattcaagggagataaactgcttcgtaagctgaaatatgtgattttcgcagtatttgtgatcctgcttccattgtttctggtggatattatgggacagggggcaccctatttctgcaaactaatctgcccggcaggaacactggagggcggactgccactggtacttctgaataaatccatgcgcagtgcactgggctggctgtacatatggaagaatgtgatcctgatcataacgattattctctccattttgatctaccgtccgttctgcaaatatatctgtcctttgggagcactttattccatctttaatcctgtttccctgtataaatacagagtggataaagataagtgtataaaatgcggaaaatgtgcaaaagcatgccagatgatagtagaccctgtggaaaactccaacagtccggaatgtatccgctgtggcagatgccgaaaagcctgtccgacaaatgcaatccagtgtggaatcagaagaaaatcacaatcatgaaaaaaataaagtgataccagaggtatgtatagaactgttatcagtcaaaattattcagatccagcccataaaatgattgataacaacagatatggaaaagggatacctgacagattataaaaagtagtctgccaggtgtttttgtatgtttttgttggaaaatgtacaaaaatatcgaaaaatatataaaaaactggtagaatcatattgtgaaaatacagaacagaaaatgaggtgactgtatggcaaagaagagaaaaaaaccgaagatggaattccgctattaccagatgcctgccggaagtccgattctggctcttctggggcagaagtgggttcagaattatggaaatgatgtggattatcttcattttcataattatctggagattggtttctgttacgaaggggatggagttatggcgtttggtgaggctaaaatgcggttttcgggaagagaatttacggtgattccacccaattatgctcatacgactaacagtgatctgggtacggtcagtaaatgggagtatcttttcatagatgtggaaggttttatgaaaaaatttctgaacaatccggtaaaggctgaaaaaatgattcagagaatatattctaaggctttatttctgaaagagaatgagtccccctctatagctgcaaaaattcttaagatcatgaatatcatgcgtgagggagaagaattttatattgaagaatccagtggagttcttgcggcattactagtagaaattgccagactgaaccgggcttcaccggaagacagggtggaagaggaaacagggaaacttacaaatatgatcacccgcgtactggattttgtttcttatcactatatggaggatatccggatagaggatctggcgaagatctgccatatcagtgaaactcatttcagaagagtgtttacatcgcatatgaaggtaagtcctctggagtatattaattctgtgcggattcatactgcctgtgaatttctgcagaaaacagatacaccggtggcagatattgcgcacaaatgtggtttcacgaccaattcaacgtttaaccggaacttcagacagataatgggagtgactccggttgaatggagaaaacggccggagaattatgaacagcagcttttggatttcgatattcattcagaggaaggatggtaaaaaagttatgaactataagattgtggagcaggtatcaagaaagaaaaagagtatgtccggagtcctgtgtgtggtaatgattatttttgcagtgctttttgtggttatgggaatcacgatttcccaggcatttatgcttccgggatttctgcttgcggggctgtattttgtctttgatatattcagtcagaaggattatgaatacatgatggaaaacggtcagtttgaaatagatgtgatctatggcaagaagtatcgcaaaacagctcatatactggaactgagtaatctggagacagtggcaccgcactggcatgaaagtgttgcaaggtacaaaaagaatggtggaacggagaagctgaaaaaatacgattatacctcttatgatgaagatactccttattatacaatgatcatccgggaagacgggcacaaaataaaactgcttcttgatcttaatgaggaactgcttcatgcgatgaaaacacaatatcctgaaaaagtctattttgcataaaatgaattaaaaactgtaaaatatgtacaaaaattgaacggaaaatttatgaaataataacaaaggtcatttttaaagacaaaaatatatatttttttgtccatgaaagtggcctttgttattaaaattacatagtaaaaacatagtaaatgagaaagtgaacaaaaaatatatttttaaatatttttaatagtgcaaaatacataaaatggtcgaaattgcacattatgtgtgcggttatgcaaactatacctgaaaatcggatgctataatcaacttacaagcgattcggaagaaagaataagcttaataaaggaggatataaatatgagaaaaaaattactcgcagtattaatgaccggtgctatggtagcatcctttgcaggatcagctacagctgtttttgcgaaatctgatgatgacaacaagttaactgtatgggcgtgggatcagaacttcaacatcaaatccatgcagatcgcagcagatcagtatgcaaaagatcatgagggattttctgtagatatcgtagagacatcttctgatgactgccagactaaactgacaacagcagcaaatgcaggcgattacagcacacttcctgatatcgttcttatgcaggacaacagctatcagaaatatctgaagagctatccggatgcattcacagatctgaaagatatcaacattaactgggatgattttggtaaactgaaacagtcctattccatggtagatgatacacactatggtgttccgtttgataatggtgctgttattgcatgctatcgtacagatatccttgacgaggcaggatatactattgatgatctgacagatatcacatggtccaagttcatggaaatcggtaaagatgttcatgaaaaaaccggaaaatatcttcttacaagtgaagctacaggtggcgatactctgatgatgatgatgcagtcctgcggagctaacttcgtaaacgaagatggcgaagcttacatcgtaggcaatgaagttgcagagaaatgcatcaatctttatgtagatctggttaagaatgacgttgttaaacttgtaaataactgggatgaatatatcgctactattacaggcggtgaggcagcaggtattgtaaatggtaactggatcacagctactctgatgtctacagaagatcagaagggtctgtggcagatcacaacaatgcctaaagtagacgatgttgatacagctacaaactatgcaaacaatggtggatcttcctggtatgttacatccaactgccagaatgtagaacttgcagaagatttccttgcaagtacatttggttccagcacagagttctatgatacaatccttccggaagcaggtgcaatctcctgttatctgccggcaggtgaatctaaggtttacaacgagccaaatgaattctttggtggacagccaatcttctccacaattgtagaatactcttctcatattccggagttcacaaaaacaccgtatcattatgaatcaagagaatgcgtcaacacagcagttgtaaatatcgtaaacggcacacctgtagaagatgcccttcaggaagctcaggatactctggcattcaagatgactgaataaattctgatcgcaggatcagatgatgtcaggattgcgggaacagtgaaactgtgaagcaatctgtagacagtgattaagtgaatgaaaacaggtaagtgcgggggactgccagcagtcccccatcttactgcaaagagttggtaattgtccggcaaaatgctgaacagttacagagttttttgaaaggaggagttcacgtgaattctaagaaaaaaggtatgtctctgcttggcaagcagagggcagcaggatggacgttcctggctcctgcaactatcatgatcgcgatcatgagcttttatccaatgatacgtgcatttatcatttccctgcagaccggagccggagcaaatatgagatttgcagatccgatcttcagcaactataaacgtattctggcagacaaggtatttcagcagtctattgcaaatacattcctgtatctgatcattcaggtgccgatcatgctgatactggcaattcttctggcacagcttctgaataacaaagatttgaaatttaagggatttttccgtacttgtgtatttcttccatgtgcgacatccctggtatcctattcattgatcttccgttccatgtttgctacagatggtctgatcaacagtattctgatcaaacttggaatcttatctaccggctataatttcctggggaattccgccagtgccaagattgtaattatccttgcgctgatctggagatggacaggatataatatggtattctatctggcaggacttcagaatattgaatattctgtatatgaagcagcaaagattgatggcgccaatggctggaagactttctggaagattactgttccgcttctgaaaccgacaattatcatgacatttatcatgtcaattaatggtacactgcagctgttcgatgagtctgtcaacctgacaaagggtggaccggcaaactcaacaatcacaatgtcccactatatttacaatacatgttttattaacgtaccaaactttggatatgcagcagcaatgtcatttatcatattcattatggtagctgtacttgcatttattaatttgaaagtaggtgatacacgtgactaagaaaaacaaatcagccattcagagaagattgattccaacctatatttttctgatcatcgtgtcatttatttcagtattcccgttatactggatgatttcagctgcaactaatacatccacagatgtatcacgtggacgaattattccgggaagccattttatggaaaacttccgtaatcttacatcccagcagccactgtggagagcacttggaaactccttcttttatgcaatccttactacagtgatctgtcttctgatctgctctatcgcaggttacggatttgaagtttaccatgataagtggaaagacagagtattttcaatcctgcttctggctatgatggttccgcaggttgcaactatggttccgttattcaaaatgttctccaaggcaggacttttgaatacagcagtaggttttatccttccgattatttccacgccgtttatgatcatgatgttccgtcagaatgccagatcattcccggttgatattattgaagctgcacgtattgacggactcaatgaagtaaggattttcttccagatgttcattcctacaatgaaatctacatatgcagcggctgctgttattacctttatgaatgcatggaactcttatctgtggccaaaggtaatcatgacagacaacaaggcaatgaccatgccaatgctgatcgccaacctgatcacaggttatgtgacagattatggtatgctgatgtgcggtgtattgttctgttctattcctacaatgatcgtattctttgtattacagaaacagtttgcagaaggtattaccggagcagtcaaataaaaaactgaaaaagaaaaatataacttcgaccgtctggaagacattatcaataatctatacagagagggcgaaagagaacacccggcagattatgaaaagtaattttgccgggtgtttttgatgcctgtttggaaatttatagcaagcctcttaattaatatgcattactgcaactatacagaaccatatggttccgaaaaggtagcattattttatggaatcgatatagtattaataaatttgtggtaggcataacggaaaaagtacggtaaaatagttagaatgcggaaagtatttttccaaaataaaacaaaagggggagggccatgtccgaagtaaagaataagaaaaagaaatcaagtattattcaggtcagtattggtgttctggcagttattatggctatccttattatcataatgatgggaattgtctcagatattcagggaacggcccgtattgtaaattataccggtttagtcaggggagagacacagagactcataaaactggagctttccatgcagcaggaaaatgagatgatccatgatataagaacttttattgacggtttgcgaaatggaaatgatgaattaaatcttgtacgtctcaatgatgttgattttcagaataaaatgcaggaactggatgataaattctctgacctgtataagaaaatttatcttgtgaggttcaaaggagccagaaacacagatattattccggaaagtgaggagttttttgtgatctgcgatgaagcaacaggcctggctgaaaaatattcgcagaaaaaagccacatccttatcattgcttgagaaatatatcacagcagatattgttgtgctgatgctgttgatcggatatgaattcatcaaagcaatacaatatgctgcaatgaaccgcctgctgcagcgaaaggtatatctggatgatgcgacgggacttccgaacaaaaataaatgtgaagaattactgagtgaggaagaaccggatgcagataccggtgtctgcagttttgatcttaataatctccggcgtattaatgacagcagaggtcatgaagccggtgatgcctatatccgtagatttgccatctgcctgcgggcttccatgccggcagagcagtttgtgggaagagcaggtggagatgagtttcttgcagttacccatggactggacagggaacagatgacacagtgccttgaaaaggtgcgcagagatatgagagaggaatccaaagtgtatccggatactcccctgagctatgcagcaggctttgcactggccggcgattttcccggaagtacaatgagagaactgtttaattgcgcagacaaaaacatgtatatcaataagaatcatgtaaaaagggaagaagctgctgcagaaaagcatcagggatatcagctgttaaagctgcttaatcagcatggcagtaatttctcggattgtctgtactgtgatgccaggatggatacttatcgggcaatccgttccagtgagaattttttcctggcctctgatggtgcatattccggtgctgtggaacagatcatagaggaacagattgaaaagtcctgtcaggcagatatccgcgaagggctgcagatttcggagcttcaaaagaagatgcatacgaaggaagacgtgctggaatatgagtataatatcggaaaacagggggcatataaccgcctgacactgattccggtggactgggatgaggacaaaaagctgcatcattttcttctggcatttgaaaccatccgaaagacttctgaaggtcagacaggtgcaaaagagcagcttcagctctattatgaacaactgaaacagtcaatcctggaaaatgacagctatgtggatgcgcttctggaattgtcagatgtgatctatacagtaaatctgacaaaggatgttctggaaagaagaatcgtattgaatggaaaagaacagaagagccgggaactttttatggactacccgcttccatgttcttatcaggattattgctgggaatatgagaaaaaaattactcaggaaacaattgccggttactgtatgacagataattgcgaaaagcttcgtaagaggtttgagaacggagaaaccaatatgtctgtggaatattgtgcccgcgaagatgatggaagtatccgctgggtacagaaaacagttcttatgaccaggatggtggtgtttgatacagaaattcttgctgaggtgcctatgatctatgcgatcattctgcttcaggataccacacagagacatgaacgggatgagcaggaacaggcgcgccttcaggcagcattcaatgagatgcgtgccgagagcagggcaaaaacgaatttcctcagccgaatgagccatgatatcaggacacctctgaatggtattattggtctgttaaagattgacgagactcattttgaggataaggaactgatacaggaaaatcataaaaagatgaagatagcagcgaattatctgctctctcttatcaatgatgttctgcagatgagtaaaatagaggaaggtcatattgttctgactcatgaatatatctgtcttaaagatctggtctatgagattgagagtattatcactcacaaggcagcagatgaggatattcagtggatttatgagaaaaataaggagaatatcccttatccttatgtctatggaagctcactgcatcttcgccagatttttctgaacatctatggaaactgtattaagtataaccggccgggaggaaagatcactacggtaatggaggctgcagatgtacatgatggaatctgtacatacagatggacgatttctgatacaggtatagggatgagtccggagttcctgagtcatatttttgatccgttctcacaggaaaaaacagatgcccgtagtgtttatcagggaaccggtctgggaatggcgatcactaaaggcttgattgagcagatgaatggaagtattgaagtgacaagtcaggtgggagttggatctgtgtttgtcattatcattccatttgagattgcccaggaacagaaaaaggatgaggaaattgctgagaaatatgatattcgtggattgcatctgctggcagccgaggataatgagcttaatgctgaaatcatagaaatgctgctgacagatgacggtgcgaaggttacagttgcaaaaaacggcagacaggcggtggagcacttcgaaaataatcctccgggaacctttgatgccatattgatggatgtcatgatgcctgttatggatggtattgcagcaacaaaagccatacgtgccgtggacagggcagatgcaaaaacaattccgatcattgcaatgactgcaaatgcatttgaggaagatgcaaaaagatgtctcgcagccggtatgaccgcacatctggcaaaaccatttcagatagaagatgtggagaaaaccattgtggagtgctgtggaaagtgatgccatatgcaaagtctgttgccatgagtaaattatcataaatagagtaaaaagtctgaatgacgaaaatatgagcagagaaagacgtgagccacagaaatgtggcttgcgtcttttttgggcaaaggtaaaaaaatgtatatgttttgtcataatctgacgtatggaaaaagaaagcagggattgttattatattgttaacaaaagaagtacttctaaaataacaaaaggacaaagcaggtaaggtaaaagaaaggagcttttatgaggaaaaagatgattagcctgatgatgacagtcgctatggggacagtcatgattagtggagcaacagttgtaaaagcggattcagacgaaaaagaaaccgttaaattagcggtgtggtcttctggagcagcagataattttcagaaaggtgcagatgaatttaataagcgccaggataaaattaattttgtagttgaaatgcaatcaggagattatagccaatatcttggagcaaaggtggcatctaatgatcttccggatatgtttttcctgaatccatatgcacaggtgcagcagtttgcagcaacagacagaattgtggatttgagcgaggaaggatttgcaacaaagatttatgattctgtaaaagatgcatgtagctatgatggaaaaatttatgcgtatccaatggctgtggaaatgttgggagtttattataatcaggagttatttgaaaaggccggaattacagaagtaccgaaaacattctcacaaatgaaagaagtatgtgaaaaacttcaggcaagtggtattacaccatttgcagccacctataaagatgcatggacattgaatcatttatttagctgtctgcagggagccgcagttggagattatgagtcatgggttgcagatatgaatgcaggaaaaggaagtttcaggaatgataattcttcacttgaatttgagtttatggatatgatgaaagaaaattccggtggaaattatatggatgcagattccacatcaggctttaatgcatttgcatcaggtgaagctgctatgattgtgaccggagaattttctcttctgaatgcacaaagtattaatccggatttacaggttggtctgtttggagtaccacttacagaaaatgaggaagatgcaaaacttgatgtagatgtaggaatttgtattgcagtaaatcagaatacgccacatttggatgcagtgcgtgaggttttgaattatctgagcgataacacagatgaaaacggatggatgcattatagtgctgattcaatgggcgcagcaccacctgcaatggattttgcaatgtcaacagaatatcagtatttcgaagattataagaattatatgtcaaataaccagacaaaaccatgggtatactcacagcttgagtccggcgctggtgatatgattgggccggtaattcagggatattttgccggaacaacggatatggatactactttagatcagttagattcgaaattttcagagcttcttgagtaaagtaaaatcgggaaaggtataagtggtaacagaagcttctgcagaaatattgcagaagcttttgttatcagaaaggaagataattttatgttggattgttgtaaaaaaaataaatggttttattttggtcttacgattccgtcgatgttattatacgttcttgcacttgcaggtccattacttttaggaacacttccggcatctttttataattggaatttgataaaaggaaataaagattttgtcggtctgggaaattacactaagcttcttggagacgagacattcattcattctgtggtatttactttaattctggcggtaatatcaattttaatgtcaaatctgattggctttgtaatagcatattttttagattcaaatgtacggtgtaaaggcgtaatacgttctttattttttattcctaatattatcagtggtgtaatggtttcttttgtatggtcttttatttttacaggagccattccaaatctggccaaaattttgcacgtagatgcattggctaatatcagctggtttggaaatgcaggtactgcggcttttacagttattttagtaacaacatggcagtctactggttttcttatgatgttatacattacaggattgcagacaatacaaaaagatgtgttggaagcagctgttctggatggatgtacaggaattaagaaaattatttatatccaattgccattgttaatgccgacaattacaattaatctctttgtatcaattgcaggagctttcaaagcatttgacattccgttatcactgactggtggaggtccggcaaatagtacacagacaattgcactgaatatatataatgatgcatttggttcgtttaaaatgggatatggctctgcaaaatctataatactgtttttattggtaggtattattgcattgattcagcttaagattactagaaaaagggaggtacagatgtaaagtggaaaaagaaggaatgaataaaacagtagttttaaaaagtattttgtggctgtgccttggaattatctttatacttccggtttttcttattatcatgaatgcgtttaaaccgaataatgatatattaacctcgtttatctcatttcccaaaagtttatatctggaaaatttttctgaagcaatgcggattatgaacttttggacagtatttcgcaatacgctgtttgtgacggtatgtactgtcatagttgccagtgccgtgtcttttatgagtgcatatggaatttcacatcttcctcaaaagacaggtgacaaattatacacattgtttgtagtaggacagattattccgtttcatgcagttatgattgcaatttctatgttatctacaaaactgggactgactaatacgcatttaggactgattatattttatagtgggttttatacatcgtttggtgttatgacatatgtcggttttctgaagagtgtgccaagagagttggaagaggctgctgcaattgacggtgcgggacctttcagaacaatggtgcagattattttgccactggtaaaatccacaacagtgacaattggcattttgtttttcctttggacatggaatgatctgttacttccgagtattatgatcagcgatgtgaaccttcgtacaattacagttaatttatatatgtttaaatcttctactaatgctcaatggaatcttttgattgcaggattagttgtaagtatgataccaattataattatttatattgtaggacagaaacatattacaagcggtttaacagcgggtgcagtaaaataaaaaagacaggagaagtaaagatgagtacattttatgaagataatatgaacataaaaaagataaatggttttacacttcagcaggtatcaagggatgtatgggcaattgatgagtttggtatagatattatgtatttgattattggaacggaaagagccttattgattgatactggcattggaataggaaatatacggtcagtagtagaaacaatgactcatctgccttatgatgtagtaaatacgcatcatcattatgaccatgtgggtggaaatgggcgcttttcaatggtttatgcacataaaaaagcaattccggttattcaggaacagaataatctgcagtcacgtaaggaatttttccgttcacaggaagcccgtccagaatacaattatgaagcaagcctggaatttgatgcatcaattatgggtgactttgagatgaaaggaatagaagaaggatttgttttccatcttggaaatagagatttggaggttttggatacaccaggacatactaaagatggaatttgtttattagacagaaaatacagattactattttccggagatactgttgtaagtacgccagtattgatgtttgatacgttttctgatacaatgagtacatatttggaatcattgaaaaaattagctcaattaagaaattcatatgaacttatttttccgggtcattatcttcgaccaatcggaagcatctatatagatgaccagattgcctgtattcaggaaatattagaaaagcatttgcttggagaaaaagaagagtgtggtatgacaaagagcgaagtgtatttttaccaaaaggctttagcttctgtgttatatacagaagatagaatctgctgaatcaatctccggtatagacgcatgatatatgcgctataccggggattcctgtttgtaagagaggtactaaaaagagatgaaggaaaaaaaaggacgattatataagttttatggaaaattaacgattcgaaataaattacttatttcctgtctcccatttgttattttaggatattttttaattttttatagtactacagttattatgtttgatcagatgaagcagatggtatatgatcagacagaacaaaatgttatggaaaaaaagaagctggttaatacattattagataattataatcaggctaccataaaatttttatattatacagatgaagtgcaggaatatttaaatacccgtcaaagtgtattaagtgttgaagagcaggaaaaactgactgatatgatttcttatcagataggatctcttattacaaataatcaggatgcgttaatgaatgtgtgtatttataataagtttaacgaattatatattaataatgcaatttattataatacaatagaacagacaaatgattttgcagaaatactgaaagaagcagcagaagaaaagcatggaaagccggtgcttcgtataaatcccgtgaggaaaaatatgattacttttgcaagaaatatctacgttccccaaatagaaaaaagtgatgaaaaaatcggatttctgatgatggatattgacaaaacgggtatggaaaaaatcatacagacaggagaggatagagatgtgaacgctattctcatattggattcagaaaataatattctggttaatggttcaaatttatctgatgataaatgtaaaactattttgaaagaaccatccggaaattataaaattatcagatataatcttcaatatgatgggtgtagtcttgtaggaattttggataaaaatctgctttttaagagtgtatataaaattttcttcaaagagatggtgatgattttggctgcaatttcaattattgcaattgcattattcataactgcggctaaaattgcagaacagattcagaaatttattgtaaaattacgtcagactacagagataaattccaatgcgtatgttgaggttgattccaatgatgaatttagagaactggcaaatgtttataatgcgatgttggaaagaattgacttgctgattcagcaggtatataaacagcagttgttaatgaaagatgcccagattgaatctcttcaggctcagattaacccacactttctatataatacattagactgtattaatagtcttgctgatatgggtaagactacggaagttaaaaagacggtaacatctcttggaagcattatgagaatgtctattaaaggggcacagtttttaaagattgaagaagaattaaagtatgtaaatcaatatttgtatattcagaaaatgcgctttcaggaacatattatctgtctggtagaaataccggaacaattatatgaatattacattccaaagctgatgatacagccgcttttggaaaatgcaattgtccatggggtttcagaattgaaagaaacaggaatgatagcagtaaccgggaaggaaacggaagatgcaatttatattactgtaaaagataatggaaatgggatgccggaaactattatcagacagctggaagaaataagagaaaatggaatactgaaagagaaggaacacattggtatctttaatattcagcaaagacttttgctactgtacggaaaagaatatggtttgactgtggaacatgtaaagccatcggggacagcagtaaccatctgtattcccaaaacaaagggggaaaaaggatatgaaagtggtaattatagatgatgaaccattgatatcagacaaattaaaaaggatcatggaaacgggactacggggtatgcatacggtttgtgcttttacagatgcacagacggcattggattatattgaacaggaaaaacctggggttattttgacagatattcgtatgccgggcatcactggaatcgatctggcaaagcagatcaatcaaatggattatggagcaaaaattgtttttctgactggatatgcagagtttgaatatgccagatatggaatagagtataaagtttttgactatcttttaaagcccgtagatgaacaggaagcaatcaagtgcttaaatcgagcgattagtgcatttcatgcagaacaaaaacatacggaaatgtatcagatttttcaggattattttgttaaaaatcaggagctgatcagacaacaatttgtggaaaaactcttttttcaacctgtaattttttcagaaaaacagatggaactgcaaaagcagaagctgcggattgcaataaacggatatagagtggtggctgttacatatgacaggaatcgtatgcctttggaagaagagagctattacagttatataatccatgaattttttctgaaaaaatttaaagagatactggcactggaacatggtggtatcttttatatgatctggccaacagaagaaaagacactgtggaaattctgcagtaaattagagctgatcagaagagaactggcccagttgcagccactggattgtatgatagctgtcagccattattctgaaaatctgtctgatattcaacagatgaaaaaggaagtgttgaaatgtctggaatacggaaaagatacgggatgtacgcagctgctttcatatcaggatttaccgatggaatataaggaaaatgactttttcgatgttacagaagcaattacagaactgatcagatatcttcgatccggtaataagaaaaaaatattcgaacagatgcagaagattatcaatgagacagagaaagagacagaaaaatattttaacaatatcatggagttgataggtgccaatatatttttatttctttcaggaattccattggataaggaaagcaaagataagattacggaatcatttgagcagcagattcatgtacaatcggaaagaaagacaaaagcagactatatgaaatattggctggagtatattgcagataatattcaaagtatgcataataatgatcagaatcagctaatccagcaaatttataaatatctgaatgataatttttcacaaccaatcggtctgacaaatgtttcagaacatgtaaacagaaatccctcgtatatcagtcgttttatcaaacaggctaccggaagaaaattttctgaaattcttgcagaactgcgtttggaggaggcaaaaaaattattacgttcgtctaatttaaagattactcagatagcagaacaggtaggatatcccaatctacaatattttacccgggtttttactggacagatgaatatgacaccggcagaatatcggaaaattacaacttatttttaagtattactatgttgcaactttgtatagtattttataagtataaggatagtcgactttataatgacgattttgcaacgctacatacaaataaatgtaaaggcaaatgcagcctctatatctgtaagcaggaaaaaagagatataggggttgcatttatttttttattgaatcaaataagcactttgcgtgattgcgaaaagcaatgagcagtgagtggggacttaacgtatagaaataaaggtagttaagaaaagtagttcacgtttttatataaaaacgtgaaaatattataaataaaagctcataaaacgtgaataatagattgacaaaagctcataaaacgtgataactttgaaaaaaggagggggttttatgtatttaaaaagaaagatagatgagtacctgctggagtggaaaaaaaatgaagaaagacttccgttaattataaaaggtgcaaggcaggttggaaaaacggaatctattaatcattttgcagaacaaaattacagtaatattgtgagtattaattttgttctggaacctaaatataaaacaatattaagtgacggatatgctgttgaagatattataaaaaatatttctatgatagatacatcaaaaagatttatagcaggtgacactgtgattatttttgatgaattacaggagtttccggatattgcaactgctctgaagtcattcaggatagatggaagatttgatgtcatatgcagtggttctttgcttggaatccattacagaaaaattcatagtaacagtgtgggatataaaacagattatgaaatgttttcgatggattttgaagaatttctgtgggcaaaaggatactcagagaagcatattgaagatatcctgaaacatatgaagacaggaactccattttcagaaaccgaattatcagtttataagaaattgtttttggaatattgtgtacttggcggtatgcctgcagtagtaaaagtatatattgaaaaaaatctttttacagatactctggaaatccagagacagatccagatggattatgaagaggatatcagaaaatacgctgaaggtctggatcagactaaaattgtaagtgtctatcggaacgtacctgtacagcttgcaaaagaaaataaaaaatttcaattaagtaaaatagacaaaaaagccagaagtcgagaatatatgggatgtataacctggctcgaagatgcaggtgtgatttctgtatgttattgtctacagtatccggagcttccattaaagggaaactatgatgactcaaaattcaaaatctattatccagatacaggattgttgattgcttcattagatgagaaagcacaagaagatcttcgggcgaataaaaatcttggagtatacaaaggtgctttatatgaaaattttgtagcagaggcgtttgtgaaacaggggcttggactatattattataaaaaagaaaatgctaccttggaagaagatttttttgtaaggacaaaagacgagctggttccggtagaagtgaaggcgaacaggaaccggtctaagtcattgaggcaattgatatccggtgattcttatggagatattcattggggaataaaacttgcagacagtaatgttggaatagaagacgggatttatacatttccatatttctgtacgttcttattaaaacgatatctcaggggaaaatgatagctatgtggaggagaataatacagtaaaaaaatattgattcacgcagaaacagatagtaagttgactcttgctccgataaaaatataaaaataaatagtttttggattgaaatcctaaaactatttatttttgtatctattttggaatataattagtaaaaaagaagggagcattattatgattatagaaagaaaagaatatttagaaaaactgatagcctggaaagataagcagttgattaaaattgttacaggtgtacgacgttgtggaaaatctatgcttctggaaatttatcgcaattatttaaaagagcatgggattgaggaagaacagattatttctattaattttgaataactgcgcgtcgcattctcgttacttcagcctgcaaataaaaagtcaatactaaaattgaagaaagtcaaaaaactttacaggttaaaaattaggcattaaaataaggccaccacaaccagtgctggtctgaaagtaaaagttttgaattagcttggatcaggaaaaacagaaagatattctttcactcgtccatagtatattctgagaaatttattagcacctgcagtcatataaacatagtaaggcttaccctgggtgcgttttctgtccatgaattgatatacaggatcatcctgaggcatggttttgataagaacatccattacttgaaaaagagtctttcttaaatttgaagatccacatttggatgttgggacgcttttttgtgcataggaaccagattcgtttaccccaggatcaactccggcgaatgcagtaagggctcctttatgcgtgaatctggttacatcaccgatctcagccataagctgtggaccaatccctttaaactgcatgacaattgagtattcaggaagctttgaggcagtctcgttcatgagagtgcgtattgtttcgacagtaacggaagtactgttgagctgatcgatagcttgtctgatgatatgtttggttatttcattcttaggaaatactggaacaagttcctttgttttggtgtaaatttcttccgcttttgatttattgaaggcatattttttgcgcttgcaccagttctgataatgttcaacaaaagcgtttagagacattttacgaatgcaatctacatgccagtatgtagagacaaaatcaacccatttctgggaaccatcactgcgggtgggactattgaaataagtatttgcatttggataggtctggtcaatgaggccaataagattatttttcatagccgttttttgtttcacatagaaatggaactgacgattcatgacctttagctgagcgcgtaattcatctgtaatactatacggttcaagactttgccatttgtcaagagcgtagcgggcaatcttgacagaatcagctttgtcggacttgattttgcgaagagaatcgttattaaaatctacttaaatgaaaaactaaattccagctgtggattatctcagtaactatgcgggattaaattctgtaatgcaccttaacaattctatttttttgtcttataataaacctgtaagcactcatgatttatgtttttatgcatactaaccgggcatctgaaaatagtgtgcgagactaaattccacatgccttatgtgcaagactaaattctggtgcagtgaaatctgcctgtgctttactattttattttataagttttggactaagcataacatcatcaggtgcgattgcctttaatcctaatgctttgtgcagtttgttgtccaagagtaaaagagagagttcatatgggctatgtccattaagactgtctcttttttcgttgtttatgtgattcatcataagtctgactttctcgtcatttaaatcagcgaatgaactccctttcggacggatgtagcggatatactcgtggttcttttcgcaggcacctttttgccaaaagctgtatggatcacagtaaaagaccgtcgtgcttttacttccgtcacagaattcctccatctcttcacgagctgagaattctgaacctccatccgtgaggatcaccggaaaaagctttttgaatgcatcctgtcctaacactgtttcaagccatacaaagacctctaacacgcattcctggtcttgatattccaacaggaacataagcataagattgcagttgcggaatgtaaaggtcaagagggcgcagctttcgcctttcattccttccacgcagtccatttccacaacatttatatctggatgatctttcatataattctggaaattttcgtagttatgaccttgacgataagaacgatcttttgcactggtctgtgtaggtttcttgcgtttcttataacgtacagaacgtcttaaatcaccattgcggacatcgaatacacaatcattgatgtaggagtaaagtgttcttctggagcaacccaattcttctgcatgagtagcataaatatgaccgatggactgatgcttctccttgatcaatggaaccaataaatcattcatggattgaatgctttccggagtctggttaatgccgactctgcaatcgaccagcacgctacggtactcatcatgggcatatttggatgaataaaactttctgggcataagacaatgggtctttttaccacagccattacatacgtagggaggtttattcagtttctcacattcagctgtctcatatgcgggacatatatcagtgcagcgaaaggatggttttctgcaaagcttacaatgaatgccacacatcttatcacacaagcatgtcaccttacagttcttgcgatgaatacatggcgggtgagtgtaacctgaatccggacgttcttttatatgtgcgtggagacgtacttcctttgatatggtagatggatttttaccaataattcgtccaatttcagtgaagcttttattctcagtaagacctttctcgatatcaacacgctgttcaaatgttaaatgtttctgattgcctttatttttcataattatctccaatctgcacaggcaggcaatcagctgcaagtacattatacggagtaatgattatcaaagacaatatggcaaatatgtgtgcaaaagtaacttcgatctatatggaatttactcttgcatttggtccaaaaccggaatttagtttttcatttaagtgttattaaaatctttaactccacgcgcaaattttttactcaaagaaagaacacatgtttacttctggcactatatgtgctaaaatatagccatgggtaatagaaaaaacaacagaatctgagaaaagagttatcagggagaaataaaaatgcagataatatccagttatggtgtggaattacgaaaacataatatcccgatccgccagacactggagatctaccgttctgctgtcagttatctgattgggatttatgtgcagatatgggaaaaattagcagaaatcccggatgcaaagaggcgttttaatgctgcagaacatctggtacatactacgaagaaaaaccatgcctgttttgattttgatatccggttcccaaagatgccttcctatctgcgcagatctgccatccagcatgcgctgggaacagtatcctcttataaaacacggctggatctgtgggaaaagacagacggaaagagtgggaaaccaaggattgtatatgaaaaccacgccatgccggtcttctaccgtgatgtcatgtaccgtgagggagcggaagggaaagacgaagcatacctgaaactctatgacggtcatgactggaaatggtcctgtgtacgtctggatcatacggatatggaatatctgagaaaatgctggtcagggaaaaaggcatctgccccgactctggaaaagagacaccagaagtattttttgcgtttttcctataaagaggaagtaacacttaccaaaacacctgtgaaagaacagattatctgcagcgtggacttagggatcaataccgatgcagtctgtacgatcatgcgggcagacggaactgtcctgggaagaagattcatagatcatcccagtgaaaaagaccggatgtaccgcacactgggacggatccgcagattccagagggaacatggctctgcgcagacacagggaagatgggcatatacgaaacgtctgaacacagaactgggtaaaaagattgcaggtgcgattgtaagatatgcggaagaaaaccatgcagatgtgatcgtgttcgagtatctggagatgcaggggaagatatcgggaaagaaaaaacagaaactgcacctgtggagaaaaagagatatccagaagtgttgtgaacatcaggcacacaggaaagggatgcgggtatccaggatctgcgcatggaataccagcagactggcttatgatggttccggggcggtaacacgtgactgggaaaatcacagtctctgtactttccagacaggaaaacgatataattgtgacctgtcagcatcctataatataggggcgagatattttataagggaacttttaaaaccccttccggcaacggaaaggtctttactggaggcaaaagtccctcctgtaaagcgtagaacctcatgtgtttatgcagatctgaggaaactccattcagaaatggaacgtttaaaagcagcatagatacaggcagatatacagtggactacctgtaatgtgggaacctgccatatctggcatgggaaatgcgcataactgcgcatctaagttacaggcgtatccgccgatattcagtctgacgcctaaagcgtctggaagcacgcgacttcagtcgtgtgaggataaagtttttaattcacgatcttgattatgaagaactgacagattacaggaaattatataaatatttaaagaaacgtctgattgatggaaaaatgacatatattttccttgatgaagttcagaatgtaacagattttccaaaagtgctggacagtctttatattaaaaaaaacatagatatttatgtgactggttccaatgcatatatgttgtccagtgagattgcaactatgatttcaggaagatatattcagattgaaatgttgccgttgtcttttaaggaatatatggagagtactggcagtatgaatgacagaggaatcaaatatgctgagtatttgcagaatagttcatttccgtttacactggaattaaaaaatcagccagatgagatcagagattatctggaaggaatctataatacgattgttgtaaaggatattataaacaggaaaaaaatcacagatactatgatgcttaagagtgtcttaagatttgtgtttgataatataggaaatccattgtcatcaaaaaaaattgcagatacgatgacctcagaagggcgaaaaattgatacaaaaacggtggaaaaatatctggaggcttttagcgagagttatattatatatcaggcaaaacgttataatataaagggaaaacaatatttaaaaactcttgaaaaatattatatagttgatattggaatgaggtatatgcttttaggatcgaggcaggcagatgcaggacatgttctggaaaatatagtctatctggaattgttacgtcgaggatatgatgtgtatgttggaaaaatcaattcatatgaagtggattttgtggcacagaataaaaagggaacagtatatttccaggtggcactgactgtacgggatgaaaatacacttttgagagaattaagaccattacaggcgatacgagatcattatccaaagattatcttaacaatggatgaagaaccagaagaacaatatgagggaattcgacgtattaatgccagagactggttattggggattgtagactgaacaatgcaaattaattagtactcatcacttgataatggaagttgatttttgtcctgtcttgtgtatcccggaagtgcctgttttacaggctttccggggcatcagtcattttgtctggtattgtaaagcagtgtcagatttgtcgtaaatgtcgtaaatttgtggtcaaaaaatgatgagaaatggagagtactaataaaatggaattaacgtatacaaatgtaaatggatatctgatcccgaatctcacctataaatccggtgagcagatggagcaacttggcaagtatggttttcttcgcagagattatctgaaaaactatcgaaattcaacctatcagatgatgcttttacaggataccattggagagcatcttctggaagtggacaaggcagccagagaacgggaagaggtaatactgaaacagttagaagaaaaagaaccattgccggataaagagaaggatcagattgcctgggtaagagctgctaatcaacacaaagcaattgcagaagagattattctcaatgaattgatttatgtttaaatgaaggtgatgaggtcgtggattgcgacctcattattgtatgaaaaatagcagtaggcagaatgagaaaaatagggtaaaatgggaacatggattttgggaactcataagaaatgattgtgcggtaaagtaacttgaaatgccagtctggcatttcaagttatagaggagatggaatggcggatcagaaagtaagagaaatggaaccagtggaaacacaaatagttgaaatcatgccaccggacgttgaaaatctgatttatgtagtaagaaacaaacaagtcatggtggatagtgatctggcaatgctttatcaggtagaaacgggagcgttaaacagagccgttaaaagaaatattgccagatttccagaagattttcgatttcagcttacaaaagatgaatatgaaaacttgaaatgccaatttggcacctcaaatggcagtggaacagaaaatggttatggtggcagacgtacattaccgtatgtatttacagagcagggaatatccatgcttgccagtgtattgcatagcgaggtggcaattaatgtaagtataggtattatgcgtgcatttgtagaaatgcgacggtttatagccaacaatgcacttttgtttgaaaggattagtaacgttgagctaaaacaactggaatatcagaaaaagacagatgaaaaactggaacagatttttgagtacatatcagatcatgaggagtctaatcaaaagatattttttgatggtcagatatatgatgcattcagcttattgataggactgattcagaaagcagaaatggaaattgttctggtagatggatatgtggatgtaggaacattaaatattttgtcaaagaagaaagaaaatgtggcggtgacagtttatacacagcaacggacaaaattatctcaaacagatgtagataactttaatgcacagtatcctaaactggatgtgaagtacacaagagcatttcatgatcgttttttaattcttgataaaacgaaagcatatcatgtgggtgcgtctttgaaggatgcaggtaaaaaatgttttggaattaatctgattgaagatgcaggtattgtaagagatattttacagagattggaattggaaacagaagaatagaaaagtaagttatgcagaaaggcgtgagtcataagaatatggcttgcgtctttttctgtctggaaaggaagtggggagcatggcacagatttttcgtgtagagagaactaagaattttacggtaatgagtaatcaccatttcaagaataagaatctgacattgaaagcgaaaggtctattatcgctgatgttaagtttgccagatgactggaattacaatatgcaaggactggcaacattgagcagagatgggattgattctgttcgttctgcaattaaggaattagagcatcatggatatgtggaacgtcatagattgcgtaatgagtatggcttttatggcgataccgaatatattatccgggaagttccattaggagaagaaaatgattaagtggagcagagaagtgcctaagggtggatagtccaattttggacaatcaggtcataggaaatttctatctccggacatcagaaaataggaaaaccagatatggtaaatcccatactggacaaaccgttgctattaataatccatgttattaaatatgaattattaaagaactagtataatccattttaattgtctttatgtttgaagtatggtatactattcccataatgaaaggggaatgatacgatgccaaatacagtaaaagtgctgaagcttacaacggatgaaaaaaactctttagagtgtcttcttcgatgtccaacaacggaagccagaaaatatatccgggcaaagattttgttattaaaaagtgattcttataccaatgaagccattgccgacaagcttgatataaccgtgcctaccgtccgcttatgtctccagaaatattttgctggcggtattgataacgctttaaacgattgcaaaggaaaaggtcgcaagcaggaaatatccgatgatgacatcacatgggtggtcaataaagcctgccagaagccgctggattacggtttttctgctgaattttggtatcccgccagctttactcgttttatacagtctattgctgtgaaggaagggcatccaaggttagaacatgtttcagaattttctctcaggaaaattcttgccaatgccaaaatccgtccttttaaagtcacatattactgcgaaaaaagggatcctgatttcgattcaaagatgcacaatgtccttgtaatttataagcaggtttcactgcagtttgataaagacgggaatctgctaccttttgagggaacccctgtccatacgttatcctatgacgagaaaccgggaatacaagcaatcggctccacaactccagatctgccgccgattagtaatacagagaaaggcagcagctatatgcgggattatgagtatatccgctatggtactatatcgttactggcggcgatagatcttcttacaggagaggcaatcccactggtgagtgatacccacaaaagttcagattttgtggagttcctaacacggttggatgcaaaatatcctgaaggtgataaaatacgtctcatccttgacaaccattcggcacatacatcgcaggaaacacagcgatatttaaataaccatttaggaaggtttgagtttgtattcacaccaactcatggtttctggcttaacttggtagaaggttttttcagcaaactcacaaagcaaatgcttcaaggtatacgtgttgctagcaaggaagaactgtcggagcggatttataaatactttgatgagattaatcagattcctattccataccatgggtcttataatctcgatagtatcgacctagttacagaggatattgaccagattgtgtatgaagttgtcaatgccaaggcggcatcggaagaactgagttgtaaacgtgcacctaagcctataaaacgcagtcctaaaaagtctgccaaaacagaaaactaattaaaacggattatactagtattttcacagttgcaaggaattgcggaaatctataaaattcatggttctgtacaaaatccagaatccattgtcattaacaaagcagattatcagaaattttatgacaaaggaaaatatcttgccgcaaaattgatgacgatttttatggaatatccgattattttcataggttactctatttcagattcagatattcaggcgattcttagcgatgttgtggaatgtttgccattggataaaatagaaactttacaaaaaagatttatttttgttgaatataatctggatttcattggaagatggtcgtattgatgaaaatatgcttgcactttcgattggtttaacaacgaccggtgtatatggtttagcaagagcagtaaattctgaacaatggtatagaaacattattttacacgattcgttatattcatgcgagcaattattagaatttgtttatccagagcttgcaaaacaaaattcctggaaattgccggtgtggtattatatttcaaaatctaatatgaaaagcgaattggcagaagaaaaagccccacattcatatactgaaattgtcacagaatcaacaattaaacgtaatcgttctgcaattggagaaagaacagcatgggaagtatggacacaagaaaaagataatttaatgaaggcaattcgtttgcttgggtgtatgccagaagaaaaaatagatgtaaatcagtatcgaggtattttgcaagcgatatttacagagaacaacaatattttaagttctttagatagtccgaatcgtagtaatcttcacagaatgattaggatatatgattttctggaatatggacaaaaaaagaccccgtgattcaagcatctgcaagcagacaccatcacggagaccccggacagctggaatacaggcaacatagcatctgtaaacagacaccatcacggatgcactataaacctatactcattatatgaggtaagctattttttgtcaacaaccagatcttggataaagaaggaaagagaaccatgattatagaagaaatttatgcaggtgtagcgataagtaccatatatttgaaagtacagagggaagataatgcagcatggatacagacaaaataatacaagatttaaatcgcagatttgctgtatttctgcctgagttttatcagcgtcgtatcattttctggtacgatgaagataaggaatttgaggataaactggatgaagtggttttggaaaatgaaaaggtgattgagctgactgggaataatgtgttttgccggaatctatatgaagctcggagaactaatgagtatgttcagtcttaatgccaatgacagccagcgtgaccgttcatgtggataaggacggtgcaatggccattacccagaatccgacacttgctccagcagtacagaaatcaaagcatgagtcgaaagcacaggaaaccgatgtccgtgtcagctctgatacagtcaaggacgctaccgttttcttggaaacattctttaatctgtacccgacagctgcggaaaaggaatttgcctattatgtcaaagacggagtgcttgctcctgtttctggcgactatgtattttcagaactggtaaaccctgtctttaccaaagatggcgataacctcaaggtcagtgtggctgtgaagtatctggataataagtcgaaaatgacacaaatctcacagtatgagcttgtattacataagaacgataactgtaagatcgtagaataaatattacagcagaatagtatacaacaaaacagagtaatgtggacatccgtttagcaccgaccgtagcggagcgaagaacattcagatgcacagatcacaatgaatgtctacaatcatattgcagagaagtctcacgtggaaaatgagatgtctaaaatgaatctgccggaaactgtacctgctgtggtataaaccataagccgttgtcgtaaaatgtggtaagaaaatcagacgaatatatttttccaagaatttgtcgtaaaaatgtggtcaaatcaagaaaattgagtgcgaaagagaatgttacgccatgcacagcgagggaataaattccctcgctgtcgccctataaaatagcaaaaatagacgcccttgcaagtaaacttgcagggcgttatttttgctattttgcatggctcgtagcgttcacaaattcttcacaaaaaattagcactcaactcttgttattacagcgtagcttttgtcttagttcatagagtgccgtaaagtgcctatttacaggcttttcacgggttttatgaatttatcacatttcatcaaaaatcgtcaatatacaaaaaattggtgtcaaaattggtgtcaaataaccttaatttgagattttgatgagcaacacatcagtataaaaaattgaatattttatagattatggaacgcctaaaatgacgttccttttctatttccagccgttcttattggacggctattttattatccaaaatgaaaggagcattagatttatgaaaaagacatggaaacgattgtgtacgggcttcttagcttttgcaactgtcgttactgctttaccgactatacccgtccatgcagaaagtaagcaatactggacggaaagtgcagagcgtgtcggtatcattgaaaaagtaatgaatgatggttctatcggttcgacattcaatgagggctatatgaaagtcgagggcgaaactgcctattgtatcgacatcaatacagattttaagaatggctacaagaccagagctgacgcaagctcacgcatgagtgccgaccagatttcagatgtggcgttatccttagagtatgtcaaacagtatggcgaagctcacaaggaattgaactataaacaagtctatctgttggaacaatgtgtagtttggcagagattgagcgtacatcttggctggcaatgtgataatgtgcgagcttcttatgatgaaattccaaaggcaacgcaggacgaagttttctctggtgcaaaagcctttgtcaaagagaataaaggacgctatgaatgtggcggttatatctactctggcgaggggcaggaattgggacaattctgggcgaagctgaatgtcggaaatgcgaaactgcaaaagacttccagtaataccagcattacagacagtaacgggaattactctgtcgctggtgcgacctatggtgtcttttctgataaggactgcacgaaacagcttgccacccttacgactgatgaaaacggaaatacagatgttgtagaggtaaaggctggcacagtttatatcaaggaattatctgcaccagcaggatataaagtagataaaactgtatattccttaaaggttgaagctggaaggacagcgaccttgaaagtatcagatacaccgaaagtaacagacactttgattaagcttttcaagattgatatggaaacacagaaagataatccgcaagggaacgcttctctagccggtgcggaatttacatggaagtattatgcaggcttctataacaaagacaatcttcctgccgaagctactcgtacatggattacaaagacaatcgctgaaacagacagcgacgggacaactcattacatcacaaaattaggggacgcatacaaggtgtctggcgataacttctatatgcagaacggtaaagcagttcttccacttggaacactaactgttgaggaaacaaaagctccaagcggttacttgttagacggtgcatatatgcaggctggcgataagtccgaacagataaaaggcttataccttacacagattaccgaggacggcgaccttgccgtattatctgggagtaatcagttttccgtatcagacaaggttatccgtggcggtgttaaaattcagaaacgagatttagaaacgggcgataccaaaccacaaggaagtgccactttgaaagatactgcttttgacgtcatttccttaaatgacaattctgttttggttgagggcaagctatataagaaaaatgaagtggtaaagacaattcgtacagatattgagggtgtggcttctacttctgctgaccttttaccttatgggaaattccgtatcgttgagagtgaagctcccgacggttacttgacagacggtgcgaagccgattgactttgcaatcacagagaatggaaaaatcgtggacttaaccgacgaagcccactctatctacaatcagattaagcgtggggatattgagggagtgaaaatcggtgcaggtacacacaagcgtcttgctaatgttccctttaggatcacaagcaagacgacgggtgaaaatcatgtagtggtaactgatgataacgggcaattctccacttctgctgaatgggcttctcataagcacaatacaaacgcaggaaagaccagcgaggacggtgtgtggtttggaacttctgaaccagatgacagcaagggtgcgttaccttatgatacttacatcattgaagaattacgctctgaaagcaacaagggttttgagcttatcccaccttttgaaatcgtggtatcaagaaataaccttgtggttgatttagggactttgactgatgaatacgaaaaagaaatctctatccataccacagcgaccagcaaggacggcgaaaaaaatatccttgcaggaaaagaggttacaatcgttgatactgtaaaattggacggacttacaaaaggcacaaaatatcagctcaaaggctggcagatgttaaaggaagaaaatgccgagcttatcattgacgggaaacgtgtggaaaacgattatacctttgtcgctgatgatgaagaaatgaaagtggaaatttcctatacattcaatgcgtctgctttaggtggcaaaaatcttgttacctttgaagaattgtatgatttcagcaatccaaacgaacccgtaaaagttgcggaacataaagacattgaggacgacgggcagacggtacttatcacagagcgtatcatcaaaattcatacaactgctaccgataaggacggcaacaaagagcttgaagcaggaaaaaaggtaacaatcattgataccgtaaccttagagggcttagaagtcggtacacagtacaaacttgtgggctggcagatgttgaaagaagaaaatgcagagcttcttatcaatggaaagcgtgtggaaagtgattatacgtttactgctgacagcgaaactatgaaagtggaagttgcctttacctttgacgctacttctcttgacggcaaacagcttgtaacttttgaggaattgtacgatttgagcaatccagacgaaccgaagaaagttaccgagcataaggacattgacgacgagggacagacgattacctttaaggaaaagccagaagaaccagagaaacccaaaacaccgcagacaccagaaaagcctagcagaccgagcgacagtcccaaaacgggcgacagtacaaatgtaatggcttttatcgtgatgttgcttgtgtctgctggtgggctggctggaacatatctttacaaacgccgtaaaatgaagaaatcataaggcggtaacggtatgatgaaagaaaaatcacgttctccgccgaagctgtcaaacggcagatttccgcttattctggcttgtctgccaacaacctgcaagaacacggatagtcaagggtgcgtaagcattgattttaccctttactatctgggggattgctggtacttcccaaaccgccagaataagaaatcacaatcaaaaaacttatcaaaaatagaaagaaacgaggtaaaacaatatggaaatgaaatatgtcgtgccagatatggctcagtcttttggaacacttgaatttgcaggcgaaagcgagccagtctttgaaagagataaaaataaccgcagggtcttagccagacgaagctataacctttattctgacgtacagaaaggcgaaaatgttgtggtagaaattcccgtgcaggctggcgaaaagcatttcaagtatgaacagaaagtaaaacttgtcaatccgaagttatatggcagaggttacgcaatcggggatatgggacataccgattatgtgttagttgctgatgatattgtagcagttcaagaaaagtaaaggagtgaaaaaattatgagattatcaaacgggtttgttattgacaaagagaaaacatttggagaattaaaatttacagcggtgcgtgatgtgttcttacagaatgaggacgggacaccgagtacccagcttaaaaaacgtatctatgatttaaaatgtagtctgcatggtggaattatccccgtgtctgtaccgccagaagtaccgttaagggaatttccttacaatgcagtcgtggagcttgtcaatcccgtagccgatacggtatcacgaaaaacctatacgggtgcagatgtggactggtatgtaaaggcagaagatattgtactgaagaataaaggcaatcagaacacaggcacttcacagaaccatacaccgcagggacaaccgaaaaaatagacttgctgaatagattttcgttgtagaggatatacggaactgttataatatgggtatgaagaaagcgacaaattagaatttgataaggagcgaaaagaaaaatgtgtgaagaatgttactctgatgaaaatagaataacaccattactaaatcccttggactgcttagaaaaccacactcaatatatttgtggaacttgtggacgttgcatttgtattgaacatgacccaaacagaggattacaaagatggaattttccttttaagtcattggaaattgcaaaactttatttacgaacagccgattatacaacgaaaagttcatgtggtatttatgagatagagaacagtaaaggcagagtatcttataaaatattcgccgggaatgaggatttacatctattcttgaaaaagaataaagacaagaaatgcaaacaaatgacacctgtgtttaatgttggagagtataaagaatatccacatacagaagtacgaaaattgacttctgatgaaataaaacaatatatgagtgaacgttaaattccagtttgacaacttcatatccatgcacacaaagcagttagtctatacgattgactgcttttttcatacccagaaaggagtgattgatttatgagaatgattttaaacaaaggacaccgtatcagagccagcgataagaaccttgtctatcgcttttcaatggggacactcctgtttgtgttcgtagcggttatcctgctattaaatacaaaacagctcatgcgtaccgactgggaacatttcagcttattagacaatggctttacgctttccctttacaacttcataaccatactgatagcgactggtgtttgtgcattggtcgcttttctgtattaccgcttctgttacgacagtttcaaaaagctactgcaccgtcaaaagctggcacgaatgatactggaaaataagtggtatgaagccgataccgtacaagacagcggtttttttactgacctgcaaagcagatcaagggaaaaaatcgtctggtttccaaagatttattatcaaatggaaaagggactgcttcatatccgctgtgaaattacgctggggaaatatcaagaccagcttttacggttagaggataaattggaaagtggcttgtattgtgagctgaccgacaagaccctgcatgacggatatatcgaatataccctgctttatgatatgatagcgaaccgcgttaccattgatgaagtacgggcagagaacggctgtcttagactgatgaaaaatcttgtctgggaatatgacgcactccctcacgctttgattgctggtgggactggtggcggtaaaacctattttctgctgacgctcattgaagccttactgcataccaacgctgtcctttatatcttagacccgaagaacggtgaccttgcagacttagggacagttatgggaaatgtgtatcataccaaagaagaaatgatagattgcgtcaatgccgtttatgagggcatggtacagcgaagtgaggaaatgaagcgacacccgaactataagactggcgaaaactatgcttatctgggactgccaccctgctttcttatctttgatgaatatgtagcattttttgaaatgctggggacgaaagaaagcgtgagcctgcttagccagttaaagaaaatcgtcatgctgggacggcaggctggatatttccttatcgttgcctgccagcgtccagacgcaaagtatttctcggacggtatcagagataacttcaatttccgtgtgggacttgggcgtatcagtgaattaggttacggtatgctgttcggttcagatgtgaaaaagcagttttttcagaagcgtatcaaggggcgtggctattgtgatgtgggaacaagcgtcatcagtgaattttacacgcctttagtcccaaaaggacatgattttttgcagactatcggctctcttgcacaagcaaggcaggacgggacggcgacgtgcgaagcgaaaggcgacggcacggactagccgttgctggtgtggcgttagccacgccagcaggtaaaacccctcggtatctaacagaggggtacgtttgcaaatagacaatagacaaaaaacataggaaacataaggcttctggcatggtttcctagcaaaaatcggctgtgaagttgccttaaaaaacttcacactttacagattgggggtatggttctgaatgaagaacaatggataaaagaattacgggagaaacggattgcttacggtatctcacaaggaaagctggcggtggcttctggtatcacaagggaatatctcaacaagatagaaagtagaaaaatgaagccgtcaaaggaacttcttaatactctgcataaggaactggcaaggttcaatccagaagtaccgcttaccatgctgtttgattatgtgaaaattcgttttcccacattggatatacagcacatcatcaaagatatattaaaactgaatatcaattatatgctccatgaagattacgggcgttacagctatacggagcattactctttaggggacatctttatttatacttcggctgacgaagaaaaaggtgtccttttagagttaaaggggcgtggttgcaggcagtttgaaagttacctgctggcacagcaaagaagctggtatgacttcctcatggacgcactcatagacgggggcgtgatgaaacgtatcgaccttgctatcaacgaccatacgggcattttagatattccagagcttgcggaaaaatgcaggaaacgggaatatatcggaaagtccagaagctataagttttatcagtcgggcgagcttatcaagcacagagaggacgacagagaatatatgggacgtaccctttatcttggttcgctgaaatcagatgtgtatttttgtatctatgaaaaggactatgagcagtacgtcaagttagggacaccgcttgaagaagccgacattatcaaccgttttgagatacggcttagaaatgaacgtgcctattatgcagtacgagatttgctgacctattatgacgcagagcagaccgccttttctatcatcaaccagtatgtgcggtttgttgatgaagaaccagacaagcgaaaaaatgactggaaactcaatgaccgctgggcttggtttatcggcgataacagacagagtttgaagctgacgacaaagccagagccttataccttagaccgtacattgcgttgggtacaaaggcaggtagcaccaaccttgaaaatgctgaaaaagattgataagggaaacggtacagactacatggaaacaatcgaacagcaggcaaaactcacagaaaagcatgaaatgataatcaaacagcagacgacccctgcaaaagatttggtggaaagttaggagtgataaaaaatgtgggtattattaaaagacttcctgctggtatctatgggaatgggtatcggtgtggtcttgatgtgtattttgaatgtcggcaaagaagctgactatgaaatgaaacaattagaagaaagcgaggacaattaaatgaatttcggacaaaatttgtatcaatggtttttatcaaacgcacagagcttagtgcttatggcgattgtggttatcggtatctacttagggttcaaacgtgagttttccaaacttatcggtttcttggtagttgccttgattgctgttggcttggtgttcaatgctggcggtgtgaaagatgtactgttagagctgttcaacaagattatcggtgcataaatttttattgtgatgttgttaattgggtgatataatatggatgtaaaaatacaactttaggaagcgatatgttatgttaggatttagtataatgatgtggtttgtttctgctatccttatattcgtgagtatttctttattaaagggaaattactcttttgttcatggtaaagtatttgatactactgataacaaaaaagaatatgcaaaagaattaggaaaacctgttttattcgtagggattggtattttagtatctggggtaattgcgattatagtaaaaaatcattctattcctaccgcagtttttttcttggcaattatagctggtattgctggactatggctacacaaaatacaaaaaaacttccgaaaattttagtttccaaatttatatttatatgcaaagcagttggtcttaggattgactgcttttttcttaccaaaatttcagattggagtgatgaaatgaacgatatttttaagaatatgcaggcaaaaatcggctgtgagtatatttccgacctgccctcttacaagcgtaaagtgtggcatgaaatgaaacgactgaaccctgccaactatgaagaaagacagttagaagatttttcaaagtatgtgtttggtatgtcgtaccagaccttaaaagatgtgatgaaacaacagaaaggacgtgaggaacaatgcaggaaacaagggtgctggtggaaacgagaggaacaactggcgaagaaacaatatcatactggttcgacctgccgatagatgttgccgagtttgaagaaaagttaggtgtcgttgcagaaagtggggattaccgaattatcgaaaaggtgttgccttatgctgatgaaatccacgaacatacaagcgtgtaccagctcaacgaattagattttatgtaccgccagctttcaagtgatatgcaggaagaatatgtatcactacttacggtgtttgagaatttagaagcactttatatttgcaggaacgtgattaccgtttatcccgactgcaaaagcatgatagatgttgcaaggcaaaagctgatgaacgacccgacgttcaaacatttatccgaggactgtcaagaatactattttgactttgaagcctacgcttctcacttgcaggaacacgggaaatttttagtaacagaacacggtatctttgaactgccagagtaggaaatgaggtggtgcttatgattgatgatatggcggtttatattgctaatcttggaaaatacaatgagggctatttagtcggtgcttggttcacgttccccattgacgaggaagatgtgaaagaaaaaatcggcttgaatgaagagtatgaggaatacgcaatccatgataccgataactttcccattgcaattggcgagtatgtttccattgaagaacttaatgagatgtatgaaatgatagaggaacttcccgactatatcgtagaatgtctggacgaatttatcagccactacgggacactggaagaagtcgtggaacacaaggacgatatttattattatcccgactgtgaaaccatgacagacgttgcctgctactacatagacgaattgcaggcacttggggatattccacccagcttacagaactacattgactatgaagcttacgggcgagatttggatatgggcggttgcttcattgaaacaagccgaggtatgtgcgagataccatactaacgctggaagatcagcgacaagcatggttgctactgacagcgtatttctcttttaagggacagtctgaaaatggctgtccttttccatttagaaacttacgaaaggagctgaaagaacttgaaaaagattaaatcttatacgggtatctggaacgtggaaaaagtcttatatgcaatcaatgactttaacttgccctttcccgttacttttacacagattacatggtttgtgattacggaatttatcatcattctgtttggggatatgcccccactttccatgattgagggagcatttctcaaatacttcggtattcccgttgctctcacttggtttatgtcgcagaaaacctttgacggaaagaagccgtacagctttttgaaatcacagataacctatgccctgcgacctaaaatcacttatgcaggaaaagccgtaaaactgcataagcagatactcaatgaaacaatcacggcagtaaggagtgtgaactatgttcccgataaaatatattgacaataaccttgtctggaacaaggacaatgaggtattcgcctactatgagctgataccgtacaactattcttttctatccgcagagcagaaatttatcgtgcatgacagtttccgacagcttatcgcacagtcccgtgagggtaaaattcatgcgttgcagattgcgacggaaagctcaatacgaagtatgcaggagcagtcaaagaaactggtaacgggaaaattaaaggaagttgcctaccagaaaatagacgaacagaccgaagcgttagtatctatgattggggacaatcaagtggactaccgcttttttcttggctttaagctcatggttacggaagaacagctcaatctgaagaacatcaaaaaatcggcttggctgacgttcaaggaatttctccatgaagtgaaccacacgctgatgaatgattttgtttccatgccgaatgatgaaatcaaccgttgcatgaaaatggaaaagctactggaaaataaaatctcccgtcgctttaaggtgcgtcgcttggaaatcaacgattttgggtatctcatggaacatctttacggcagggacggtatcgcctatgaagattatgagtatcagctaccaaagaagaattataagaaagaaacgctgataaaatactacgaccttatccgcccgacaaggtgtgtgattgaggaaagccagcggtatttacgcttggaacatgaggataaggaaagttatgtgtcctattttaccgtcaatgcgattgtaggcgagcttgattttccgtcgtctgaaatcttctatttccagcaacagcagtttactttccccgttgatacttctatgaatgtagaaatcgtggagaaccgcaaggcattaacgacagtccgcaacaagaaaaaggaactgaaagaccttgataatcacgcttatcaagcaggaagtgaaaccagctcaaatgtggtggacgctttagacagcgtggacgaattggaaacggacttagaccagagcaaagaaagtatgtataagttaagctacgtcatacgggtgtctgcacccgatcttgacgagctgaaacgccgttgtgatgaagtcaaggacttttacgacgacctcaatgtgaagctggtgcgtcctgctggggatatgctggggcttcattctgaatttctccctgccagcaagcgatatatcaatgactatgtgcagtatgtaaaatcagatttcttggcagggcttggctttggtgcgacccagcagttaggagaaaacacgggtatctatatgggctattccgttgatacgggaagaaatgtgtacctgcaaccgtcccttgccagtcaaggtgtgaaaggtacagttaccaacgctttagcttctgcttttgtcggttcgcttggcggtggaaagtcgttctgcaacaatctacttgtatattatgcggtgctgtttggcggtcaagcacttctgttagaccctaaaagtgagcgtggtaactggaaagaaacgctcccagagattgcacatgaaatcaatatcgtaaatcttaccagcgacaaggacaatgcaggacttcttgacccatttgtgattatgaagaatgtaaaagacgctgaaagtctggcaatcgacatcttaacattccttacgggtatttcctctagggacggcgaaaaattccccgtacttcgtaaggcggttcgctccgttacccagagcgacagtcggggcttgctccatgtgatagacgagctacgccgtgaagatacgccagtatcaagaaatatcgcagaccatatcgacagcttcacggactacgactttgcacacctgctgttttcggacggtacggtggaaaatgctatcagtctggataaccagctcaatatcattcaagtagccgatcttgtgttaccagataaggacacgacctttgaggaatacacaactattgaattgttgtcggtgtctatgctgattgtgattagtacctttgctttagattttatccattccgacagaagcatttttaagattgtagaccttgatgaagcgtgggcgttcttaaatgtggcacaaggcgaaacactttctaacaagctggtgcgtgctggacgagctatgcaggcaggcgtttattttgttacccagtctgcctatgatgtatcaaaagaaagtctgaaaaacaatatcggcttaaaattcgctttccgttctactgacatcaacgagataaagcagaccttagaatttttcggtatcgacaaggacgacgaaaataaccagaaacggcttcgtgatttggagaacggacaatgcttattgcaggacttatacgggcgtgtcggtgtggtacagatacaccccgtctttgaagaactgctacacgcctttgataccagaccgcccgtacagagaaatgaggtggagtgatgaaagaaaggataaaaggtgcgttcacaaaaaagaagattttccgctttctcaaaatggctctatttgtcgtggcactctcccttatcctgctttcacttctggggacggtggctcatgcgacggggcttgtggacgataccataaacgcagaaaatctttactcaaaatatccgctttccaactaccagcttgatttttatgtggataatagctggtcgtggcttccgtggaactggctggacgggattggaaaaagtgtgcagtacggactttactgcattaccaactttgtctggactatcagtttatatttaagtaatgcaacgggttatgtggtgcaggaagcctacaaacttgattttatcaacgatatggcagacagtatcggaaaaagcatacagacccttgcaggcgtaacacagaacggtttttccagctctggcttctatgtcggtttcctgcttctcattatcttagtggtgggactttatgttgcctatacgggacttatcaaacgggaaacgagcaaggcacttcacgctgttatcaactttgttgtggtgtttgtgctgtccgcttcgtttattgcctatgctcccgactacatcaagaagataaatgaattttcatcagacatcagtaccgcttcgctggacttgggaacaaaaatcatgctccccaactctgacagcgagggcaaggacagcgtggacttgatacgggacagcctattttctattcaagtggaacagccgtggctactcttacaattcggtaacagcaatgcagaggaaatcgggacagaccgtgtagaagctctggtatcggcaagtccagaggacgaggacgggaaaaccagagaggaagtcgtaaaaatagaaatcgaggacaacgacaacagcaatctgacgataccgcaggtcgtaaaccgtttaggtatggtgtttttcctactattcttcaacttagggataacaatatttgtattcttgcttacgggcatgatgttgttcagccagatactttttattatcttcgctatgttcctgcctatcagtttcctgctctctatgataccgagctatgaaagcatggcaaagcaggcaatcgtgagggtgtttaataccataatgacacgggcaggaataacgcttattgtaacggtggcgttcagtatttccagtatgttttataacatatccgcggactacccgttttttatggtggcgttcttgcagatagtatgtttcgctggtatctacatgaagctgggcgacttaatgagtatgttctcacttaatgctggcgacagtcaaagcatgggacgcaggatattccgtagaccgtatctgtttatgcgacatagagctaggcgtatggaaagacggcttgctggtgcggttactgctggcggtgttgctggtgcggtggcaggtagcacgatttcaaacagaaaaccgacaaggaacacagccacaaaagacagtcggggcaataccacttccagcatgggacagcgtgctggctcaaaggtgggtgctgtcttagatacgaaaaataaagtgaaagataaggcaaatgctgtcaaagagaatatcaaggatatgccgacacagaccgcctatgcggtgtattccgcaaaggaaaaggcaaagtccagcgtgtccgactttaagcgtggcatggtgcaggaacagcagtccagacagatgggacgtttggaaaagcaggaacaacatagacaaaatatcgctgacaagcgtatggagcttcaaaaggcacaagaagcaaggcaggcacagcgaaaggctgacggatcagcgacaacgggagctacccgtccccatgagcgaccagccacagcttcaaagccgagtgcggaaaaaatgcaggaagtcaaacgccctgccacagctccaactccgaaagcaagtgaaccagtcaagacaaatgttgtgaaagagcgtccgctatcttctggtgcttctgatagaaaagcaacccagcctgcacagctagtacataggcagaatgtagaaaaagtggtatcgcaggaaacacgccagaattacaccaaagaccgcaggacaaaggttcagcagaccacagagaaaagccgtaaccttgtaacgaagaaaggacagaagaaaaaatgaaactgaaacatatcgctatcattggcagtctgtttcctatcctcttttctctggtgcttttctttggtgtcttgattagtgcggacagcgacgacgagaacagcaacttttcttctggtattacgggtatgaatttatccgcagaagtcttgaaacatcagcctatggtagaaaaatacgccagagaatacggtatttccgagtatgtcaatgtgctattggctattattcaagtagaaagtggcggtacagcagaagatgttatgcagagttcagaaagtcttggtttaccgcctaactctttagatacggaaagctcaatcaagcaggggtgtaagtattttgcgtccctgctttcttcctgcaaaaatcaaggtatcgacgatttgaatgtagcgatacagtcttataactatggcggtggctatgtgggatatgtggcaggaaaaggaaagaaacacacttttaatcttgcagagaacttcgcccgtgagaaatcgggtggaaagaaagtaacctataccaacccgatagccgttgcaaagaatgggggctggcggtatggctatggaaatatgttctatgtggaattagtcaatcaatatctgaccgtggcacactttgataatgcgacggcacaagcgattatgaatgaagcgttgaaatatcaaggctggaagtatgtgtatggtggcagtaacccgaacacttcctttgattgtagcggacttgtgcaatggtgttatggaaaagctggtatctctttaccgagaacagcacaagcccagtatgacgcaacccaacatcttccactctcgcaggcaaaggctggggacttggtttttttccattctacctataacgctggttcgtatgtaacccacgtcggcatttatgtaggaaataatcagatgtaccatgcaggcgacccgataggatatgcagacctaagcagtagttactggcaacagcacttaatcggtgcaggacgagtaaaacaatagaaaggacttgaaaaatatgtttaagaagaataagaaacagacagaaactctcaaagaaccaaaagaaaaaaaggtgcgtactgtcaaggtaggcacgcataagaaaaccgtgattgcgttgtgggtggtgcttatcgcaagcgtgagctttggggtgtataagaattttaccgctatcgaccagcacacgacccacgaaaaagaaatcattgagcttcgcttgcaggacactaacgggatagaaaatttcgtaaagaattttgcgaagtcctattatacatggaataacagcaaagaagcgattgaagcaaggacgcaggcaatcaacggttatctgacaaaggaattgcaagacttgaatgttgatacaatcagaacggatataccgaccagctccacagttacagatgtgattgtgtggagtatcgaacagtcgggaacggacactttttctgctacctacgaagtagatcagcagataaaagagggagaacagacaagtaatatcaaggcaacctataccgtaaaagtccatgtagacgctgacggggatatggtaatcgttcagaaccctacccttgcaccagcaatcgaaaaatcagactatgcgcctaagacatcagaagcagacgcaagtgtagacgctgatactgtaaacgacgctaccgcatttctggaaacattctttaagctgtacccaacagcgacggaaaaagagcttgcttactatgtattgggaaatgtgattgaacctatcggcagggactacatttattctgaactggtaaaccctatctttataaaggacggcgacaatgtgaaagtcaaggttgcggtaaaattcattgataatcagacaaaagcgacgcaggtatcgcagtatgagcttgtgctacataaggatagtaactggaagattgtaggataaatgatatagcgtgcatttcctatcagatttgcacgcttttacaaaacgacaagaaaactgtgcaaaaatattgacttgtaatgaccgaatgctataatataaatgacaagtgtacttggtattatttgaaaggagcgttatataatggataaagaaaaaatactatcacaaaacaaaaaagagaatctatatcttgatgaatacgaaaaacatattaaacttcaagggaaatcttttggcttaatgtttgttttatttatctgcattttaattcttttcattaaagcagtttgtaaagaaccttactatgacataatgacaattattgggtctgtggcatttggctctatgggttatgaagcacatatttcaaaaaataaatccaaatttgttattgctttattctttcttctatttatggggtattacttttataaatttttaatggtaggtttatagaatggacgaacatttaattttgcgaaacagattaaaaactgtacgaaaagaaaaaaaattatcacaaacagaattagctgaactagtcggggtttctcggaatacaattagttctattgaaactggacaatttaatccaacagcaaaattggcattagtgctttgtatagctttagataaaaaatttgaagaattattttattttgattaaaggagagaacaattatggaattagaggaattgattgttgaaatagttataggattgtttttactttttacatcttatcaaataggaataaaagagaatattactttattacatggttatcattatacacaacttgaccctaaagataaaaaggtgtttacaaaaaaaataggaataggcactttactggttagtattggtattcttgttatgccgattatcaatttaatctctcattctgaattaggctattacataggtcttattttgattgttgtaggagtgttttatatcatattcatcattgtaaaatacaacggaaaacttattagctttaaaaagtagaattgaggtatgaatatgataggactgaacaaaagagatataaaaaaggcattgaaagctggtgcaaaggctggcggtgtatcattggctgatgttcgggcggatatagaagctacgattgatgaagctattaacagcaccgacccagaagtgcaggcaaatttcaaaaagtattttggaaataaacgccctacaccagaggaatacatttataccattacgaaaaagacaaaggtaaaattataataaaagggtcgtggaaatgtttcacagaattgtgatctgcattatcacggctcttttactctctgtttactttcaaaactgtaagtgtaattgaatactgcccttgctataatttaattgtattccaaaacaaataaatgtggcaggaagaaaggagcgatttttaatggaacacattttaaatttagagcaagtaaaaaaatactacgggggtaattctggaaatatcacaaaggcagtagacggtatttctatgtatgtagacaagggcgaatttgtcgcaatcatgggagctagtggttctggaaagactaccctattaaactgtatctctacgattgatactgtaaccagtggacacattacagtcaataatcaagatattacaaaaatcaaggataaagattttgctgatttcagacgtgaaaatctagggttcatttttcaagatttcaaccttttagatactttaacgattgaagaaaacatttctttgtcattggtaatcaacaaacggaaccctgctgatattgaaaaaagagttcatgctatcgccgataaattgggtattcgtgatattttatcgaaatttccttatgaagtttctggcggacaaaaacagcgttgtgcttgtgctagagccttaatcaatgaaccgaaactgattttagctgatgaaccgacgggagctttggactcaaaagcttccagattgttgctggaaacaatggctgacatcaataagaaaatgcaggcaactattttgatggtaacacatgacccgtttagtgcgtctttctgtgaacgtattttgttcttgaaagacggtaaaatattcaatgaaatcttcaaaggagaaaaaaacagaaaagacttcttcaatgaaatactggatatattaaccttgcttggaggtgaagtgggaaatgttaggtaagttagcgtatagaaatacaaaaagaaatattaaagattatatgatttatctgataaccgttactgtttccttttctcttatatttgcttttaatttggtggcaagttctgatgaaattgtaaagttatgttccagtatggatgcatttaagaattcattgttcgctgtaaatatccttattgtttttgtgatatgctttttgattaactatacaacgaaatttatgtttgaaaagagaagtaaagagttaggaacatatatgcttcttggcattgagaaaaaagaaattgcccacttagttgtaattgaaaatatactgttgggaattttagcaattgtattagctattcctattggctttttattcagccagtttgtgtcgttagtaattgtaaacttactgggtattccaaaaactctctttatttctttgaatttcgtttctattggactattgataatttattttttaactatttatgttttggttttacttaatctattaagaagaataagtaaaatgacgatacgtgattttctttattttgataaacaaaatgaaaagaaaatgttccgtgacagtaaaaaaagaaatgtcatttttgtcttaagtattattcttggtgtgatttctctttttctctggaattcacgttgcactatggataactttaataagcaagaaacacttacctatttaatggtaagcgtaatcatgttgattatcagcatttatggtatatctacaacttgtgcagatatgttcttgactgttttgttaaagaataaaaaaatgaaatatcaaaatgacaatctgtttgtagcaagaacatttgcttctaaagcaagaacaatgagcttcacatttggtacattgtctatgttgattttaacttcactgctggctctgaattattctagtatcaacaaagcttcgtatgatatcagcgtaaatttaaatgcaccatatgatgtacaactctttgatgataagcaggtatttgatgaatatattcgagtaattgaagaagaatatacgattgataataccattgagtacgacatttataaagagccgaatcatcaggtacaaaatttcttccaatcagaatattatgattttgacccagtcttgaagttaagtgattataataggttactagaattaagaaagatgccgttgctttctttaaatgataacgaatactatatagttacaaatagcaagtttgcatatgaggttgaagataacaaagacattgaaactataacagtagcaaataaaaatttgaaattaaaaggatatgacactaagtcttattggaactctataactaatactggcagatttgttgttgtacttccagataaatatgttcaaggacttgaagtatcagaaaatcatttgattatagatacaaaagaagaaacagatgcagaattagaaaacaagataaaagaagatatgcaacatcaattagtaaaggttgataaaaatggagaaataaatgacgaatcgtatagagtaaatgtaagaggtgcagaaatagaacaacaaaaagcaatggttgcaatagtagccagtctgtttatgtacattgcatttattttgatttccgcagtagggacaattttggcagttcaatcattgagcgactctactaaatacaaatatcgctacttgaccttgcgaagattaggaataaatgataagtcgctatttaagacaatcagaaaacaattattgatattattttgtgtccctgcaatatcagcaatattatgttcttttgtgatgatgtcgtcattgaataatgtgtatcaacaaattttgggagataaacacctttatctaatctactttggcttgaatttaattatcttcttcctaatttatagtatttactggattgcaacgtatattggttttaaacgaaatatcaacgaggagagttagacttttctagctctcctactgtgaaattattataatgataaatcaagggggtgttgaaatgagaatagcaattatcgaagatgatgaaatcactcgtttggagctttctaaattattgaacacacaaggatatgaaacagttttattgactgactttggaaacctgacagatgaattaaagcaatattccatagaactggttctgcttgatattaacctgccgtatgagaatggctatgaagtatgcaggaaaataaaacaagtcatgccagtaccgattatctttgtaacaagcagagatacaaatgctgacgaattgaaaagtattcaagtgggtgggattgacttcataacaaagccgtatgacacgcttattcttcttgagaagatcaagcgtgcattgcagttgtcaaacccgaataatttccgtgagcttgtcaaaaaagattgtacccttgatttacatttatccattttgaagtatcaagagcaaagcattgaactgacaagaaatgaatttcgtattttgtactacttctttatgaacgaagataaagttattagcaaagaagaactattggaaaagctgtggaatgacaaatattatatagacgaaaatgtattattggttaatatgacccgtctaaaaaagaaaatgaaagaaatcggtattgttcatttattggaaaatatacgaggaaagggttggaaactgtgagtttttttacattcttagaagaaaaaataacagagatattgtttcagcttttctttcttgccgtagtagcatttctcttgattttctacggtgtagatacgctgtttgttgtatcgttggtaattctgttcatcagcatacaagggctttttcaatggtgtttgtatcggaagaaacgtaacgtttcacaacatattattgatttagtagacggactggaagaaacctattatattgcagacgttttaccaaagccaaaagaatttcaaaataaagcctattgctacgcactaaaaaaagcctgcaaatctatgaatgatgaaatcggcaaaatcacagaggaaaagcaggactatcaagaatatgtggaaagtttcgtccatgaaattaaaataccgataggagcattgtctttgacgtttgacaatacaaaaaattacacattaaaaaaagaaacagacaaaatatttcagttagtggaacaaatgctctactatgcaagaagcgaaaatacggaaaaggactattttgtaaaacagttgcagttagacgaagtgatacataatgtcattctgaaattccgtcattcgcttatggaaagaaaagcaattatcaatatccatgacatagaaaatgtcatttatactgatgaaaaatggctgacattcattctatctcaaatcgtgcaaaatgcgattaagtattttgataagcaagaaaataaactgacgatatacagtcaagacaatggtacaaatatattgcttgtgattgaagataatggttgtggaataaaagcgtctgatttatcccgtgtatttgaaaaaggttttacgggttcaaatagaaacaaagcaaatgcaacgggtatgggactgtatctatcgaaaaaattatgcgataggttgggcttgaaattggatattgcttctacggaaaaagaatatacaagactgaccattacatttccaaaaggaacagttcataatttttcagagtaatttgaaaaccatgccaacattgatacggtgctttaagggggcttgcattatggaaagctttaagtacaattatttgcaatcaaattccacctaatagcacactattaaaaattgaatatgttttagctttaaaggctcgtacagactatatgttttgtgcgggcttttttcatacccgaaaaaaatttaaaaatttttcaaaagaggtcattaaatcacacctttcattccctatatggtgcggaaagagggataaacacttttcaaatcatagtggaaagggggtgagattgatgaaaccgtctgacttccagaaaacagttcaatgtcgctttgaaagttgtttgaagaaagttgtccgtcatgttgtaaaggactaccaacaaggattaaaacgacgaaaagacaaagaaattccattctgtgaacttccagaaattttcgttgaaaattttgctgtgtgggacgactacgaaacagattatacaatcttttcagtatgtggcattgatattcgtgtccttgatgatgagctggcagaagccttgaaaaaacttccagaaagaaagagaaatactctgttaatgtattacttcttggaaatgacagaaagtgaaattgccaacttacaaaagattacgcaaagcggtgtatttagaaaccgacatcatgctttggaaactatgaaaaaaatactaaaggagaagcagtaaaatgaagcaaacatttaagaagccgtcctactatttgctttcgcaagcaatggacggggacgaaaaagcgattgaaaaaatactggcattttatgacccgtacatatcaaagtgctgtttgcgtccactctatgatgaatacggcaatgtctatattgttgtagatatggagttaaagggacttatccgagaagcacttatcaaaatgattttagggtttgatattgccttagaaatcgaagaagaataagcagtttttagcagagcatggtttaatgtccccctctttcctgctctgccctgcttttacatgaaagcaacacgctttcgccacagctctttgctacgaaaataaaactcgtagccaaaaactgaaccttgacaacaaatgttttcaacaattatgaaagcatcactataaagcagtcacagtattggctgcctgtagtgagagattgatcgtatttaagaaaggctagctttgagcttccacatgataaccatgtttttccaattcccgtatataacgagaaagctgtttttgttcacagtgcttacgtcttgtttcaaaacaggattcgtcaaatagagttccttgttttaacattgtgtagatgatgacaagaagttttcgggcaagtgcgacaatcgcttttttggctccttttttctgtttgattctccagtaccatgccgaaagataagtgttgcgtttccctgcaatcacccaggcaatttcgcagagcatactttttatgtaaggattgccttttgtgacagaggtgctttttcgttttccagcactttcgttattacctgggcacaaaccggcccatgagcagatgtgttccgcagttttaaacggcttcatatcaataccgatttcagcaataattgcacaggaagcagttgtgcttattccatagatgctattcaactgctcaacctgcagggcaaatggagccatatcttcctcgagactcgtttcaatttcagcaagatgtttctttaaagaatcataatgagtcatgagaatccttaaaaatgccttttggtgttctgacagtgttccgttcacggacatgagaatttcatcaatacggtttctggtcttggttttgagacaagaatctaaagcagttttatcaatctgcccatgttcaactaaatgcagaatgatgtttctacccgaagcgccaaaaatatcagaaataaaggatgatagacggaagccggaactttgtaaaaatttctcaatcctgttcttctgtgacgtaatatcgcggatgacactcttacggtaacgatttagatcgcggaattcccgaatccttttttcgggaataaaacttccgttcaaaagtccggcgcgaagcaaggtggaaatccattcggaatcccgcatatcggtctttttgccaggaacatttttcatatggcgtgcatttacaacaagcagggtaatgtcaccagagaaagcatcctccagtatttcataaatcggcatccaatagataccggtgctttccatagctacatgatggcagtttttagaaacgatccaattccgtaatgctatcatatccggaatcaatgtagaaaactcacggatttcagaacgggttggcttgcccagaggaccagtcaggatacatgcaacaattttttctttgtggacatccagtccacaggaaatttccagaaggtctttcatacagaacaactcctttactatagaattggcaggagatttgcccgagataatacggactttgctactcgtgctattcataaaaggtgcgacaatatgctgtgctcaagggcaaatcatttacgttgacaaacggggtgcaaatcctccaaggtgcaatcaaacttaatcctgcctaagactattgtaaggcaaaaagagaagtgaaaaaagtagtggagtcagtatcctattttcattataggctgagataagctttcatgattcgttgacaactgaataaagcagacagatacgtttgtgagatagcgagccacggggactgtacgccacgacctttccaaaagaaagcgagcgacccacgcagtgatccgagagcgactgttggaaaagtcgttttgccatgacctatcctcacagaataatgatacgtccgcatggtgcggttctgcccacaagaatgggaatagttgagatactaatggagctttccaaagccgtctgtctgcttatgtaacttataaatagacacacagcaaagggggtgttacattatgttaaatactgatgtgttaaatgatgtgatgttccagcgaggtaaggtgttggaatatgaataaaacgaagataagagcaacggaacagccgattgctgttgatatagagggactgtctgctatgttatcttgtggtcgtgctactgcaagaaagattggcgagcaggcaggagcaaaaattgtgataggtcgcagggttctttattccatagaaaaagtcaagaaatacttgttatatttggaagaatagagcgattttctatttatgttctctggcgtgtgtagtataataagaaaggacaaagcacgctgtgagaacaagaaaagaggctttttcagaaaggaatggttctcatggcaattagtagaaaagacccaaaaggaagaaaattaagagagggcgaaaactggcgtaatgatggaagatacagttatcgttatacagatgcaagaacaggcaagagattgacagtctatgcacaagatttaccagagcttcgagaaaaagagaagcagattgcaaaagatatggaagataatatattgacagacggagcaatcaaaaaaatgacgcttaacacgttgtttgagcgttatatggcaactcgtgagctggctgatactacaagagttagttatgttcgtgcttgggaaaacagagtaaaagacgagattggaaatattaaagttgttcagcttttaccctcacatattaaagcgtattatgcgaaactttccaaagctggatatgcttattctacaatcaagtatattcacaacctgctttatcctgcattagaaatggctgttgatgacgatattatccgaaagaaccctgcaaaaagttccattagtgattatggaaaaccagcagaggaaaaggaagccttaacagtttctcaacaagaaaagtttatggagtttgtaaaacagagcaatgtctataacacatattatcctatgtttaccataatgattggtacggggttaaggtgtggggagcttattggtcttacatggaaagatataaacatcaaggcaaaaacggttaatgtagaccaccagctcatttataagaatttaggcgacggttgcaagttccatatctcaacaccaaaaacgtcgtcgggtattcgtattatacctatgacacaagaagttgcaaaagcctttgaggaacaaagaaaaatcaattttatgcttgcaaaggataagagcattgaggtggacgggtgttcggggtttgtctttacagcaaaatcgggcagaccgcttatgccgaatggcgtaaatagtgttttatacaacattgtagacgcatataacaaaaccgaagtagagagagcaaaaaaagagcataggaaagcagagctgttaccaaagttttcagcccatgtcatgcgtcacacagcttgtaccagaatggcagagtgccgtatggacgtaaaagttcttcaatatattatgggacacgctcatatagatgtaacaatggaagtgtataaccatattggagagctgacaaggattgaaaatgagattgcaagactagatagtatggtgttaaatgcttgacaccacaaaaagagaaattggtgtcaaattggtgtcaaaacagaaaaaatcacaatttcaaaagaaataagatactgcaaaccattgattttaaatggtttgcaaaaaaaatctcaaaaaattagcactcacctcttgacagtgctaataataagtgttatattacagctagaacaaaggaaggggaacaaaaagagaacaaagaaataagttctatgagattcctgataacctaagttccaaagaaacaaggtaaagatgcataactgagagtccatcatatacagatggacggtatagaaaaggagagatgacttatgttgatgcctagtatttttggagaaaatttatttgatgacttttttggagattttccattttattatgatgacagagcaatgaaagatacagagaagaaactttacggacgcagagccagccatataatgaaaaccgatatcaaggaaactgataaaggctatgaactggtcgtagatcttccgggatttaccaaagatgaagtaaaggctgacctggagaatggttatctgactatcagtgcagagaaaggtctggacaaagatgagcaggagaaagagacaggacattatatccgtaaggaacgttacgcaggtgcctgcagccgtagcttctatgtaggtaaagaagttgagaaagaagacattaaagcagaattcaaacatggtatcctcacattatttgtaccaaagaaagaagcaaaaccagcagtagaacagaagaaaacaattgccattgaaggctgatgaataaatattctgactgacccgttaagggtcagccagagattaaaaacagatataaaaataaaagcttacactaataaaagattgaagataaaaggttgaaaaagcctgtaaagatagatttggaaagtaaatctggcgaacagatttgacatatataaaatatattagaaaaggagatatgacttatgttaatgcctagtatttttggagaaaatttatttgatgacttttttggagatttcccattctattatgatgacagagcaatgaaagatgcagagaagaaactttatggacataaagcaaatcatgtaatgaaaactgatatcaaggaaatgaataacggatacgaactggttgtagatcttccaggatttaagaaagatgaagttcatgcagcacttgaaaatggttatctgaccatcagtgcagagaaaggcctggataaagacgagaaggaaaaagagacaggacgttatatccgcagagaacgttattcaggtgcctgcagtcgtagcttctatgtaggtaaagaagtacatcaggacgacatcaaagcagaattcaaacatggtatcctgacattatttgttccgaagaaagaagcaaagccagcagtggaacagaagcacagcatctccattgaaggataatagatgttaagttacagcaacgggaggtcaaatcttttggcttcccgttgtttgcataatgaggattgcagaaatatgaagtcaggaatgattgcgttagaatgtgtttatgagggaaggtgatgatattgaaaagagactactatgaagttcttggcgtgaacaaaaacgcagatgcagcaacgattaagaaagcatacagaaaactggccaagaaatatcatccggacagtaatgagggaaatgcttcggcagcagagcattttaaggaagtaaatgaagcctatgatgttctgagtgatgagaagaaacgtaaactgtatgatcagtttggccacgctgcttttgaagaaggtgccggtaattatggaaacgcacagggaagtccttttggcagtggctttggcggagcacagggcaatccatttggcggtggtttccatggctcgtacagtgatggcaatggttatcatgaatatcattttgagaatggcgaagatatggatgatatcctgaagaacatctttggtggtggatttaagaagagtaaatcatccggtggttttggaagcagcggtttcggtggcagtggatttcacggaagtggttttgacggattcggaagcaatggaactggcggcttcggcagtggctttggtacaggtggaagtgatttccgcagtcagggctttggtggttcttacagcagtaaaggtgaggatcttcatgcagaggttactgtcagctttgatgaagctgcttttggcggtaagaaggttattcgcctgcagagcagcaacggtggcgtccagaattacgaagtcaatattccggcaggtattgaatccggtaaatctatcagacttaaaggaaaaggatatccgggagtcggcggaggtgaagccggtgacctgcttctgaaagtaaatgttcaggataaactgggatataaacgggaaggcagagatgtttatacaactgtaaatatcccatttacaacagcagtatttggcggtgaggcgaaggttcacactatttacggtgatgttctctgtaacattaaaccgggtactcagtccggaatgaagatacgtctgagaggcaaaggtatcgttgcaatgaataatccgtcggtacacggtgatgaatatgcaactgtacagattgaagttccgacaaatctgacaccggaagcaagacggaaactgaaagaatttgagcaggaatgtaatggaagccgtagaagccgtggatttggcagcgggagtgcggcgtgaagagtaatcagaaatatttttgagaatatagtgaagcaattttacagagaaacgaaaaggatacatgcacagtaacattaccgtgtatgtatccttttagcataatagggaaaaatattctatgagctttttctgatatagaatattgtttatctgggttcttttccatcacggaagagcatcatcatttccttggtcaggctgatattattgccctgatccgggattttgtcacgttctacccactgtgccatggagagctcttcatggtcaacggtcagggtatcatcgccgtctacatcacagaagaatccgaaaagcagggtaccgctgaaggaccatggctggcttttgtaatagcggagattctttaccttaaggccaacttcctccattacttctctgtgaacagtttcttcaatggtttctccgatttctgcaaagcctgcgataagggcgtaacgcttaaatctgcggccctcatatttggaaagaatgattttatctccgtttgtgattcctacgattactgcaggacacaggacagggtactcctgattgccgcaggaagggcattccatcatacgttctttttggctgtgcagcattggttttccacagcagccgcagaaccggcgcttgctgtaccactggaaaagctgatgtcctgtaactcctgcaaatgccagatgctgtggccgggctgtccgaagatttcgtatatcctggaattcgtaatctggaagaagggtggtatccaattccgggatcagatagaaacgctgatcatcgatagaaaacagataaatatacttgctgtagagatctgaaactttttcctccagatcctgaaaacgtggaaaataaatatccgcttcccgttcctgatgtggaagaagaatactgcctttttcgtaggcaaggataaaactgttcttatccggggcagaaggtttgtattcgttgtggtaagtgtgtggtgcgatatcctgaatcatattgtagatatccttttctttattttgttataaaataatttcataagattctgataagattatttgtgagtgtagttataaattctttatggtttatcagaaaaatataagaagataatgagtggtaaaataatacagattcattatctgttcatagtatattcttggagttttataaaagcaagcaataaatattcattctgaaaaaagacgatatgtcagataatttaataataatacaaagaaaattcgtaggtatacaaaaaaaaacagatagtttataatagaaatttggaagggttaaaataatgtacgtgtaaacaaacagggaggaaaaggattgaaggtattaatagcagatgatgaaataaaggtatgtcggctgatccagcaccttgtagattgggatgccctggaaatggatattgttggttttgcaaatgatggaaaaactgcttatgaaagtatttgtgaaaagaaaccggatattgtgattacagatatacgtatgccggtgtatgatggacttgaactgatacgcagggcaaaagaagtgaatccggagattaatttcatagtaatcagcggttacagtcagtttgaatatgcacagcaggcaatcaagtatggggtaaaagactacctgctgaaaccattaaaaaagagagaactggaaaactcattaactgaaattaaagaatcacatgaatctctgattaagagtaccagaatcagaaacgaaatggaatctatcattgaagcatccagagaacatatacgggagaattttcttatgaaaacgctccaaaactcagcaactaatccgctaaaagcagatatgagtctggaacagttgaatgaacagtatggttgtaaatttcataaaggattttttacagcagtcagagtcaggccatttttctcaaaaaattcggacaaatctgccggtgacagtgaagaatttgtaatgaacaaaattcatcagatggtaaaagaaaaattggagatatactgcgaaacttatatgtctacagtatatcaggatgaaatcgtatgcattttaaatacagtggataaagagattgaaccagtcagaaaaaagctaaaacatttgatagttaatgtatctaatttgaaaactgtatttcctgatatcagaataaggatcggacagggaaatacacatagttcttatatgggaatcacggatagtttccgagaggcagaactggcgatcatgaatcgaatgggcgaaaatgaagatacatatatctgctacagtgaagacagtaaaagtggaaaaactaaagaagaaatttttgacagtggtctgcgaaatgaaattctgacctatcaggaaagaatggatattgaaggaaccctccgccttgttgacaaggttggagagaaattgaagccatttaagtatgacggaaaactggtttatgaagtttttggtgaattagttgaaacattgcggtttggtatgaaatattctcgtgaaggcagaaatctttttctgattgaagattataaaaaacagtacagaaggatatgggattatgatgaactctttcagtggatcaaatcggatctgtcccgggtgcatcaggtttatatgaagaatattcaggatgaagagagtaaaccgatacgtgatgcaaagaaatatatccatgataatttcaacaaacatatcagtctggagaatgtcagtgagtatattggatttaatgctgcctatttttctacactgtttaagaaagaaacaggaaaaaatttccttgagtatgtgacagagcttcgtatccaaaatgcaaagaactatctcatacagactaattatgacattgcggaagtagcatctgcagtaggatataatgatctgaaatatttttctaaattgtttaagaagacaacaggattgaatccttcagaatttagaaagttatatagttaatcaaaatgtgcaggtgcaaaaactatgaaaaaaagaaatatatttagcagacaggcagttaattttttgtgggttcttctgggattaggggcaggttttcagtttatagaagttatatgggctgcatcgaaaggatatctgggattcttttctatgatggtggttattgtgacagagatggttattacaggaagcatttatgtgattatttataagtttctgataaaaccatgtaatgagaccagaaaattattcaaacattttatacagagtggaagttttcaggaactgattgatcaggattatcagatttttccagagcagaatgaagtaatgcagaagctggattccatattggataaaaagaacattattgagttatcgacaaaacatgcagaacttcttgcactgcagaatcagatcaatcctcattttctgtataatacgctggaagcaatacgaggagatgcgctatgtgaaggaattgatagtattgctgatacgacggaagcattgtctacatttttcagatataccatcacggatacaggaaatctggtttcagtagaagatgaactggagaatgtagagaattattttaaaatacagcagtatcgttttggagataaactggatatgagagttaattttccggatgactatgcaaggatcctggaatgtaaactccctaaacttactttgcaacctgtagttgaaaatgcaattttccatggtctggaagcgaaagcagaaggtggagttatcatcatttcactggagatgacagagaagaaacttctgatcaatattcatgatgacggaattggaattgacgaagaagagcttataaagatcaaccagagactggagataacttcagggccgctgacagaagagaagcgtaaacgtggaggtattgctctgccgaatgtatccaggcgtattaagctgttatttggggatgaatatggaatacatatttatagtattcctaatcttggaacagaagtcaggatatcggtaccgatcattacaaacagggagcagagaaatcagtgaaaagagaattactgaatatagaaggcggaaagataaaaaaagggaataatgttatatttgatgatctgtctctggaactgtttcagggagaaataacaggaatcgtattcgatgatattctggaacagaagctctttattgatatgctgcttggagatgttttactttattcaggaaagatttttgtaaatgaggaaaggaaagcttatgaagaagctgccagattgttaaaacatcaggtggcggtgattggttctaaaagtaaattactgccttctattacgatagaagataatatatttcttttttcagacagaaaactgtttctggatcagaaagagtatagagaacgtttccagaagttaaggacggaactgaatatttcggatgatatgcctcataaagtcagaaatttatctgccaaggaaaaggttattatagaattacttaaagcctatgaggaaagaaagaaaattgtgattctggatgagattaccagccttttatcagaaaaggatctgggagaagtgttttctcttattgacaaaatgaaatcccagatgtcatttctggttacagtaggatttgaagattttattatggaatggatggaatctattgcagttgttcaaaatggaagaactacatttgtatctgggatttctcagttaaactgtaagttgagtaaagttctgaaagctctgatatatgaaaataaggcagaaacatttggagcctatgggcagaaagtaataaatgggcagaacaatgtattagaagtaagagatgtaagtacctgttatctgaagaatcttaattttacattgtgttccggagagctgcttaagatttattattcagatgaaaaaagcaagagcagtttctgggaaatgttttcgggagaagagagcattgaagaaggacagatttatatttctgagaaattgtataaggtatcaaatatgagccaggcagtacgtgagggcgtagggtttataacagaagcaccgtataggagcatgatcctggataatatgagtgcaacggaaaatgtgagtgtgccactacatgaaaaggtaagaggattctggtttgcgaaaaagtataccagaagtgtaagtgatttccttcagaacgatgagctgaataagaagaaactgaaaaatattggaaatgcagaactacagaagctggcctatgaaaaatggctggtgtatcagccaaagattgtgatcattgagaatccatttacagatatggatattaatatgagggaaattacaagaaagatgatcggagcattgcagaaaagaggaatcggagtaattcttcttactgctaactttgcaattatgaataaaatcaagggagaatccatgtttcttaagcacggtgtgctgacaagagaagaagaatggtaaaacaaaaaaagacgaatgtgcaatgatgataaaaaatttggataattcgtcttttttttgtacaaaaataagaaacaaaagaatgccccccttaatccaaatatcaaaagttgaaaaaataggacctcaaagttaatatgagtatacaaaataacaaacgcgtaaaataaactaatgggagggtttacaaatgaagaaaaagttattaagtgtcttaatggcagcagtaatggtagccggtgttggcggcgtaggtgcagcacaggtaaaggctgatgatgagaagattcttggcgcaggtatttattcagcttctgataacttcaactcttatattggaaaagcgattacaaatgcatgcgatggaatctttaaaacaaacatcgaagatggacagaatgaccagtccacacagaacaatcaggttgatacaatgctggctaaaggcgcttctgcagttgcagtttctgtatgtgatgtaacagcagctccgacactgatccagaaatgtaaagacgcaggaaatgttccgatcattttcttcaacaaagagataacagattacgatgtaattaattcttatgaaaatgcttatcaggtaacatctacaggtggagattatggtgcatctattcaggcacagatggtaatcgactactggaaagaacatccggaaatggataaaaacggtgatggaaaattacagcttgtatatctgatgggtgacccgggacatacagcatcccagccgagatgtgattatctcaagagcacgatcgaagatgcaggaattgagattgaccttcttgcagaagatacaggaatgtgggtaacagcaactgcaaaagaaaaaatggatgcatgggtatctaaatacggtgacgaaattgaatgctgcgtagcaggaaacgatgcaatggcacttggtgctttatcagcagtagaagcagccggatttaatacagatggagaagaaagcagcaaatacattccgatttatggaattgatgctcttcctgaaattctttccaagattgaaagcggtgagatcacaggttccgtattacaggatgctaagactcagggacagacaattgtaaaaatggcagagaaccttacaagtggtaaagacgctgtggatggaatcgaaggtgtagaagtggaagaagaagcaaaagctgtacgagttccatatcaggcaatcaccaaagataatcttgatttagcaaagtcaacttatgaataaaaaataactgattttacaggcaggcattcgttttaaacggatgcctgtaataaaaaagagggaaaggattttaaaatgggaacagaatatatattggaattaaagcatatttcaaaatcgtttcctggtgtaaaagcacttgacgatgtaacgttatgtgtacgtcctggaacagtgcattctcttatgggagaaaatggtgcaggtaaatccacattaatgaaatgtctgttcggtatttattcatttgatgagggcgaaatcattctggatggcaaaaacattaaattttccagcccatcagaagcattacagaatcatgtatccatggtgcatcaggaactgaaccaggtattaaatcagacagttatggaaaatatgtggcttggaagatttccaatgaagcatggtctggtagatgaccagaaaatgtatgaagacacaaaagcgattttcgatgatttggatattcaggtaaatccgaaggttaagataggaaccctgaaagtttcacaaaaacagatgatagagattgcaaaagcagtttcgtataactcaaaagtaattgtaatggatgaaccgacttcatcgcttacagagaaagaagtagagcatctttttaagattatagaaaagcttaagaaaaagaataccagtattatttatatatcacataaaatggaagaaattttgcgtatttctgatgatgtaacagtcatgagagatggcaagtggatcgatacaaaacctgccagtgagttgaccattgataagatcatcaaaatgatggttggacgagaattaaaagaccgctatccggaaaagaaagccaagataggtgatgtattaatggaagtaaaagacctcggtacattaaatccaggatttgagggcgttaattttcaattacataagggagaaatccttggaatcgccggattagtaggatctaagagaacggaaatccttgaaacattatttggcataagaatgaaaggcaaaggtcagatactggtaaaaggaaaagaagttcagaacagaagtccaaaagaggcaatggcgaatggatttgcaatgctgacagaggaacgaagatcggatggtatttttggaggtttgagtgttggatttaatatgacaatttccaatttaccgaaatatcagaagacgggacttttaaacggagaaaaaatgaaagcagatattaccaaaatgataaatgccatgaaagtaaaaactccgtcaatgaagtccaagatcgcaaacctttcaggaggaaatcagcagaaagtaattctgggcagatggctgctgacagatcctgatatcctgctcttggatgagcctaccaggggtattgacgtaggtgctaaatttgaaatctatcagctgatcaaccagctggctgagcaaggaaaaggaattatcgtagtaagctcagaaatgccggaactgttcggaatttccgacaggattctggttatgagcaatggacatcaatcagctatatttgattcaaaagaagtaggacaggtagatgttatgcaggcagcggcccgatttatctgatctttcaatacgaactcaggaggggattctggtgaaaaattcaaagaacatttcaattaaagaacttattgctgaaaaagcaatttatctggtttttattatcctgttagttgcaattgtggtagtagaaccaagattcttatcattcaataactttaaaaatatttttgcgcagtcatcaactaagattattattgcattagcagccggaatggtactggtagtgcagggcgttgacctttccacaggacgtatgatcggtctggcagcagttatcttcgcatctttagttcagaatccggactatgcatacagaatgtatccgaatttaaaagagcttccgctgatcgttccattattactggtactggcaatctgtcttgtacttggtggaatatccggtgtgcttgttgcagtatttaaagtaccgccgtttatcgcaacgcttggtatgcagttgatcttatatggtgcatcttctatttattttgaccgtccgccatatggtgcacagccaattggtggtattgattcaaaagtaactcagattgcaattggttccattggaatcggagatttccagattccgtatctgatcatcattgccgcagcagtatgtgtagttatgtggatcgtatggaataaaacaaaatttggtaaatatatgtttgcagtaggtggtaacccggaagctgcaaaagtatccggtgtaaatgttataaagacacagattatggtttacgcaattgcaggtatgatgtatgcatttgcagcagccctggaagtaggacgtatcggaagtgcttccaatacaaccggtaacggatatgaaatggatgcagttgctgcctgcgtaatcggcggtgtatctctttcaggtggtgttggtagtgtaggcggtatcgtaattggtgttctgatgttcacagttatcaattatggccttgcattcattggtgtaaacatgtactggcagtatatcgtaaaaggtctgatcattcttcttgctgttattattgacatgagaaaatatgcaaagagaaaataaaaataaacatcagacaagtgcaattatgaaaggagaagtaaaggatgagggatgtagtaaaaagaacaaaactgacagaaaattgttcaaaaaaaacaataaagaaatatgtagatgaagtgatccaggaactcacactggatgagaagatcggtgtaatgtcaggccaggttacagagaagaaattactggatgatctgttcctgatcgaacactataatgtaaagccatatccgacaaaggcagtagaacgtctgggaattccgaatatccgtttcgtagacggaccaagaggtgttgttgccggatctgccacctgctttcctgtttctatggcaagaggtgccagctttgaccgtgatttggaagagaagattggagaagtgatcggtgcagaggttcgtgcagtgggcggaaactattacggcggtgtgtgcatcaatcttccaagaaatccacgctggggccgtgcgcaggagtgctacggagaagatacctatcatctgggagaaatgggggcagctctgacgagaggtgttcagagccagaatgttatggcgtgcattaaacatttcgcaatgaacagtattgaaaatgcgagatttaaagctgatgtgcatgcagataagagaacactttttgaagtatatcttcctcacttcaagagatgtattgaagaaggcgcggcttctgtaatgggagcatacaataaagtttatggagaacaggcatctgagagtaaatatttgttaaaagatatcctcagagataaatggggattcgagggatttactttatctgatttcctctgggctgtaaaagatggtccaaaggcagtaaagagtggaatgaatgttgaaatgccatgtatctgtcattatgcagaacagatccctaaagcaattgaagacggaactcttgctatggaagatgtagatgaagcagttggttacattcttcgtactgtactctattatgagacaagaaaagatccgcaggaatatacagaagatattcttgcatgcccggaacatatagcagtagcaaagagagcagcagaagaatcgatggtacttctgaagaatgaaaatcatgtacttccgcttgataaagagaaaacagagaagatcgtagttcttggagtactgggagatacagaaaatatcggcgaccatggttccagtaaggttcatccatattatacagttacgccatttaaaggcctgatgaaaaaaatgccgaaagcacagatcctttataatgacggaagtgatctggaacgtgcaaaagaacttgcagcagatgctgatgcagtagtgatcgttgccggttatatccatagcgatgaaggagaatatctggctgatagaagtgatattgccggaatgggcggagacagagcaagcatgagacttcatcagagagatatcgatctgattcatggtgtaaagggtgtgaatccgaatactgtcgtttccattatcggaagtagtgcgatcctgatcgatgagtgggaaaaagatgttcctgcaattatcttctccttctacagtggaatggaaggcgggaatgtactggcagatattctgttcggtgatgtttgcccaagcggtaaacttccatatacagtagcactttccgaagacagttatcctgattttgatcctgactgcacatatgcagagtatgaatactatcatggctactgcaagatggataaagaaaacattcctgttttgtatccgtttggctatggtttatcctatacaacatttgacatcagcgagccgacagttgaagtatttgataaaacagcaaagatttctgttaatgtaaagaatacaggagatgtaaaaggcgcagaagttgtacagctttatatcggatgtgagggaagtgctgtagatcgtccggttaaaatcttgaaagatttcgcgagagtagaattaatgccgggagaagaaaagaaagtttctcttcaggtaagttcgaaggatatggcttattattcagaagaaaaagatgattttgtagaagaggatattacatatattgcatatacaggtgattgcagctgtaaagaagcattaaaatccgtgaaatttgaatttggaaaataacagggagaaaatactatgagaattggtgcggattattatccagaacattgggaaaaagagcgttggaaaacagatgcagagatgatggtcaaagcaaatatcaaagtaatcagaattggtgaatttgcatggagcctttatgagcctgaagaaggaaaatacgaatttgactggatggatgaggcactggatttttttggaaagtacggaatcaaggtagtaatgtgtacaccttcagctacccctcctaaatggatgatagataagtatccagatattcttcagaatgatattcatggaaatccgaagctcttcggaacaagaaagcattactgctttaacagtgagacatacagagaaaaaacaaaaaaattaaatacccttattgcaaagagatatgcaaaacatcctgcaattgaagcatggcaggtagataatgaactgggatggtcaaatacaaccagatgttactgtaaatcctgcgaaaatcgttttcgtaactggctgaaagagaaatatggtaccattgataatctgaataaaacatatggaactactttctggagtcagatatacagaagcttcgatgaactgatcatcccgaaggcaggagcctgctatgatacctgccatgacacacagggacagaatcctgcactgttgttagattattatcgtttctgcagcgattccgtaattgattttacaaaagaatctgtaaagacgatcagagaatattctgatcttccgataaccagtaatcttctggatgctgcaattaattcaggaacaggaatcgactactttaagttatccaaagaatttgacttcgtaacatgggataattacattgaattccagtggggaaaagcaaaaccggaaacagtatcaagagaccatgcattactaagaagttataaaaagaaaccattctgggttatggaacagcagtccggtccctgtggatggagcaagatgggtccgacaccaacacctggaaaactccgtctgtggacatatcagtctgtagcaaatggagctgatacagttgtatacttccgctggagagcatgtccgtttggaacagaagagctctggcatggtattttgaatcatgatggaaaaccaaacagaagatatgctgagatttcccaggtgggagcagaaatggaagaattaagtaagagctatcaggcactgatgccgagagcacgtgttgcgatcattaaatcctttgacagtgaatggagccagtccatccatcgtcaggtagaaggattatactatgattccttattgcttgattattaccgcccattctggaatatgggaattccggtagatttcgtgacagcagaagaagaattagatggatatgatcttgttcttgcaccaatgctgatgatggtatcagatgaaggaaagaagaacattgagtcttatgcacaggcaggtggaaaaattctgttctcattcagaagtggaatcaaagatatgtacaataacatgcttacagaaactgtaccaggtgtatttgcagacctggcaggtgtagaagttgaagattatgatccgcttcttgagaaaacaacagctgcatccggtgtatttggcaacggaactgcacatatgtggtgtgatatagtgaaaccggttactgcaaaaatacttggcagatatacttctgatttctatgcaggtgaagcatgcatgactgtaaatcagacaggaaaaggtgaggtatattaccttggctgcgatctggatgaaaaagccatgaaaatgttggctgtttatctgggaagaaaagcagggattgatatggatttatataaagttgatggtgtagaagttgtagatgctacagatggaacaaatgatgcattgtttattttgaactataatgaccattcagttatagtttcaatggagcagtcatatgagaatatgatcacacatgaaacagtggagaatgttgttgaattaaaaccatatgatgttgcaattttaaaagaagcaaattaaaaaaataatgaaggggagctgctgtgaagcaggcagttctagagcagggtgagcaattcatttagaattactcgccctgtttatgttatagaaaaaaagaaaaataaaatcagaaaaaacagttgatttttaaaagcgatggtaatataatcattttaacaaattgattggtataaccaatataagaagaggtaatactataaggaggggctttgcagttatgggatatgtaaaatggagttatgacacattaaatactttttgccacgacgtatttcgtaaatttggttttaatgaagaagagacgaatatcatcaaggatgttttgcttaccgcagatctgtacgggattgaaagccatggaatgcagagaatggtaagatatgataaaggaattgagaagggaaccatccatccggatgcgaaacctgaggtcgtatttgagacacctgtatcagcagtgatcgacggacatgacggtatgggacagctgatttcccattttgcaatggagaaagctattgagaaggcgaagaaaacaggggttggatttgtatctgtaagaaactccaatcatttcggtattgcaggatattatgcggaaatggcttccaaacagggcttacttggtatggcatgtaccaactcggaagcaatcatggtacctacctttggacgaaaagcaatgcttggttccaatcccattgcagtggcaatgccggcagaaccttatccattcctttttgactgctccacaacagtagttaccagaggaaaactggaaatgtataataagatgggaaaaccacttccacagggctgggctctgggagcaaatggtcaggaaagcacagatgccccggatgtacttgccaatattgttgccaagaagggcggcggaatcatgccacttggcggtaataaagaggtaaacggaagtcataagggttacggttatggaatgctctgcgagattttcagctccatcttttccatgggtgttacttctgataaatgctgtacatttaaagacaagacaggtatctgtcatggatttgctgccattgatcccgcaatcttcggaaatgcagatgatatcagggcacatttttccgaatatctggaaactcttcgtcagagtccaaaggcagaaggcgcagagcagatttatactcatggtgagaaggaagtatttgcagaaaaagagcgcagagagaatggcattcctgtaaatgacaacacaatggttgagcttgccaacctctgcaattatctgaaggttgattttggctcttacttcaagggctatgaactgccgaaggacagtaagttctttagtggtaattattaaataagcgcccatcatgctgataaccataactatagaatatatcatataaaattactttttttgagacgcccgtttatcagcatgtggaaataaaaagaaactgcataatcagatacgaccggtagaatttacagatcgtatctgatatgcagttttttgttttctttaattttcttcagtattcttcggacagttatgagcattcatgtcatcgttgtctgtcataagatatttgcggatcgcaaacagaactgcgatactgagtacgccaagaagagtttctgctggcccgaggtgttcgactaccatctgacgtgctgtggcaaacatcagaacctcaacaactgtctgtgcggaatgctggcagagcatttttacaaattccacgcctactaccagagacaaagcctgggaaaggaaagtgctgaaaaattctgtatccatggacataacagaagtatctgcaacttccatgatcagccggaagcctgccagtgcgatcaccagcagaattaccatagaaagagcaatttccgcgtagcgtgaaatattgtaaatgattgtgttaaagtgtttacgaatgttatggttaacctgtcgtttggggctcataactgtgagtcctttctgttttgttgtatatggtgaatgtaaagaagtgtaactgtttatagtgttacgaaaaagattaatataaataatctttatttacataaccatatttgcagagtttctgggagtaaatataccagtactgtgcatcagttgtatccacaagctgaactgtatcgctggaatataactgtccaatctcgttggaagagtcgtaagccttcgcagagcgcagagccagataaccggtagcaacactgactgttctggtggcatatgtggttgttccgccaatcagataatctttatttacatagccggataagttcagtttcggagaatagacataccagtactgaggatcactgctgtcagaaactgttacagtatcaccggagtataactgtccgatctcgttggaagagtcataagcctttgcagaacgcaaagccagataacccttggcaacactgacagtataagaaccggacgaacttgtcggctgtgatgagaggaaatataggtaatcgttatttacgtatccggatttgttcagttttggagaatagacgtaccagtaatcactggtggtatattctgtaacttcaacagtatcaccggaatacagctcgccgatctcgttggaggaatcataatccgtggcagagcgcagagccagataccctttacttacacctacctgataagtgtcagatgccataacaatctgtgagctgcagggtacagatacagcagcaatcgtagctgcaagaatcatgggaattgcaatattttttctttttttcatagtgaatccctcctttgggttattatgtactctgagagtacattatttaattatagtaatcgtaaatcgttctgcttaaggtagcgatcgtattctgtgcggaaccggcacttgagagattctgggacataaatacgattactacgtcatttttggaatcatagatgattccggcatcattttccacgttgtcaagttctccggttttatttgcggttttgactctttccggaagctgtgcgggaattttgttacagcgtgtctgtgccttgagcagattaaacatatcagcggcatgggtgtagccggatgtatcctgtttataaatctcctgcaggagatgaccacagtctcctacagatgtgtagttatcatcattctcattgctggcaaggagcatacgtcccatgtgagtctggtcatagccatgtgcctggcagaaactgttgacagcctgcatacctgctgcggaatcgccgccgccaagataagttgtcagggtattggctgcatcattatcgctgactgtaatcatggagtacagattggagtctacagaatctctgccgtattgtccggttatctgatcataattctcgtagacagctcccatgatatagagcttgatcaggcttgcagcctgcattttctgatcattaagactgccctcggttccatttacaagatcggatatgaaaacagcccaggttccgttttcagcgggaagctgactttgaacctgttttaaaattgtctccagtttctcatctgtgacaggttctgaagatgtgcctgccccggaaccgttaaagacgctttcagaactctctgaagatgaagaaggggaaagcattccctgaccttctacggatgttcccgcggcctctgcattttcagcagcatgactgctgtatgcaggagtaacaagaaggctgagcgatagcagaggtattaataatttttttgaaaacattgcgttcaccacctgttaaatatttactgtaaaacattcggaatctgttgatctgttatataaatcgtatttcttcatgtttagataaatcaggtttaaaagtcttattgtgcaagcacaaatgatttttaaaatctgatatctgtatgtacaaaattatacagtgttaagagttgtgttacaagtgtatttacggttgattttaaaatttattatatggctgccggttactgttggcacaatacttgagatgcgttcatacaatttgtaggaatacgggcgtgaaaaatccgcatatctgattatatattttggattgtataaatgctacaataaaatcatcagaaacgagataaagaacgacaaattaaacaaaccaatgtgggaatgtgggggcattttcatattgcatgaggaggtagattatatgttaacaccgaaacagaatatgctggaagttataaaaggcggaaatcctgacagatttgttaatcagtatgaagcagtacagcttctttttcatccgtttatgtttacaaacccgctgcttcagccgggacaggaaaatgtagtgaatgcatggggggtaaccaatactttcccgaaaggagttccgggttcttttcctgtacatactcctgacaagatcgtggtaaaggatattgaagactggaaagactatgtacatgcaccgtctttgaaatttacccaggatcagtgggatatggtgaaggctcagtatgatgcagttgacggagaacaggcatttaaagcagctttcgttgcaccgggattatttgagcagactcatcatctgtgtgagatcagtaatgcgttggtttattatattactaatccggatgaaatgcatgatctgatcaaatatctgacagagtgggaactggaacttgctgaaggtatctgttccaaccttcatcctgatgcattattccatcatgatgactggggtggactggacagtacatttatgagtcctgcaatgtttgatgaatttttacttgagccatataaagaaatttacggatattatcacagtcatggcgttgagctggttatccatcattctgacagttacgcagcaacactggttccttctatgattgagatggggatcgatgtatggcagggatgtatggaaaccaataatcttccggaactgatcaggaaatatggcggaaagatcagcttcatgggcggtatcgaaaatcgtgcagttgattttgagggctggacagatgagaattgtgatgcagtggtacgtcgtgtctgcgaagaatgtggaaacaaatactttattccatgtatcgctcagggtggccctggttctgtttatccgggtgtttataaatctctctgtgattccattgacaagctgaatgaagagaaatttggcattaagacatctgaatctacaaggcttccatggcagattatgttctgatctcaggtatttgtcagtggcaaaacggaatacaaatatctgtccgacatttagatgaaatttcaggtgttgcagaggatgatgctatggaggtgtttgaaaatgattattattggtgagaaaattaatggttctatcccgatcgttgcagaagcgatcgcgaaaagagactctgaatttattaaagcaagagcaaagcttcaggcggaaagcggagctacttatattgactgttgcgcttctgttccggaagcggaagaagtggaaacattgaaatggatgatcgactgtatccaggaggttacagatcttccaatctcaattgacagcccgagtccggatgttctggcacaggcttataagttctgtaagaaacctggaatttttaactctgtatcaggagagggacataagattgatacgattttcccgatcatggctgagccgggaaatgagggatggcaggtaattgcgttgctgagtgacaatacaggtattccgaaatgtgcagcagatcgtctgaaagtttttgacaagattatggcgaaagcgaaagagtacggaattgctccggacaggattcacattgatccgctggttgagatgctttgtacttctgaggatggtattgcaacgaatattgagacgatcacaagtgtacgtgagcagtatccgaccattcatattacggcagcaatcagtaatatttcctttaatctgccagttcgtaagctgattaattacgggttcctggtactggcaatgaatgcaggactggacagtggaattatggatccgacaaataaggatatgcttggactggtttatgcaacagaagcattacttggtctggatgattattgtatggaatatataggggcttacagagaaggcttaattggtacaacaaagaagaagtaagttgaatctgcagaaactgtgtaaatgaattaagtggttggaatctgaaattgagaaataacaggaggatttgattatgtctaagataaatgaagttgcggaattagttgaaaaagggaaagcgaaattagtaggaccggctgtacaggaagccattgatgagggtgatgatccggttgcgattctgaatgatggtatgatcagtgcgatgtctgtagttggtgagaaattcaaaaatggtgagatttttgttccggagatgctggttgcagctcgtgctatgaagaaaggtgttgaggttctgaaaccgcatctggcatctggttctacaggtgcacttggtaaggttatcattgctacggtttccggtgaccttcatgatattggtaagaatctggttgccatgatgatcgagagtgccggatttgaggtgatcgatcttggagttgatgttccggcggctaagattattgagtgctataaagagaatccggatgttaagatcattgctctttctgcgctgctgactactactatgccggctctgaaggagactgttgaggcgttgaatgcggcggatttcagaggtaatattaaggttatggttggcggagcgccgattacagaagcttttgctgaggaaattggtgctgacggatattctgatgatgcggctagtgcggcgtcactggctaagaagttggcggcctgatctgattgcttgtgcgggtataggtataacatgaaaatattatgaggggactgctctggggagtggtcctttcgtgtattttgggatttttttggagtatgttataatggaaaaaaggggacgctcagaaaaatattttatttcatgtgcggtttcggggtctaagatattctaacctctcagaaatctgctaaaggcatgagcagccttctcaaactcgctccgttgcaaacttcgctcagacagtgatacagtctgctcataacgcagatttctgagagctaagaatatctaagacccctgcaaatgcacatgaaataaaatatttttctgagctggctgttggttgttgtgatgattggattggatatgtgggaggtttttatggcttgggttaagtttgtgcgtgaagggattgagatagaagtgaatgccgggatgtctgtgttggaagctgagattcgggcgggtttgaggccggatgcgccttgtggcgggctggggaaatgtgggaagtgtctggttaagattaatggtgaagttgttaaggcgtgtcagattcggattggtgaaggtgagacttgtgtagtggagacattggacagggctggcaatgagaagattttgacggatggatttaacagagaagttgtgtttgaaccgggattacggatggctcaggttgagctggagaaggcgaaaacaggggagaagcggtcggactggcagaggctgctggatacgctggcggagacagatggtgaggttgagccggggcagatggaggtgaatctgaagttggcgggtgaattgtatgggatgcgcagggattctgatgaatggtatgtgatttacagtagacggcggattctggaaatgaggaaggaagctggtcggaggtgtctggcagcgtttgatattgggacgactaccattgcggggtatttgctggatggtgcggatgggaggactctggcagttgagagcaggatgaatccgcaggcgcagtatggtgcggatgtgatcatgcgggcgaattatgcgctggagcatggaacagaagcgttaagtatgtgtgttcggaaagcggttaatgagatgttgggaagtctggcagaggatgcagggataaggagagaggatgtttttcaggtgtgtgttgtgggaaatacctgtatgcatcatctgtttctggggatttctccggcttcgctggtacatgcgccctatattccggctgtgagtgagaggctggtgctgaatgcgggggattatggtttggctgtgcaggagcgtgcagagttgatcatgctttcggatattgcaggatatgtgggagcggatacctgtggatgtctgctggctatcaggcaggatcagcaggaagagatttctctgatgatcgatattggaacgaatggtgagatggttctgggaaacagggagcggatggtgacctgttctactgcggccgggcctgcttttgagggtgcgaagattgagtgtggaatgcgtggcgcggccggggctgtggatcatgtgaagtatgaggatgggaagtggaactatacaactgttgggaataagccggcggttggtttgtgtggttcgggattgatcgatctggtggcgggtcttctggatgctggaatgctggatgagaatggtgtgctgagaagcggacaggagaagcaaggtatatttattctggtaccgccagagcggggcggtaatgagagaggggtttatctgactcagaaagatatcggagaggttcagcttgcgaaagctgcgattgcagcgggaattcagatgcttatggagcagcttgggattacagaagatgatatctgttcggtatatattgcaggtgcttttggcaactatatggatccggtcagtgcaggaaagattggtttgcttccggcgacgcttgtgaagaaagtgatgccagtgggaaatgctgctggtgagggtgcgaagatcgcacttgtgaatgagaaggaaatgctggagatggatgagctggtgagaaagattgaattcgttgagttggctgcttcggctgattttcaggatcattttattgatgaactgggatttgagacaggtgaatgattttatccgcctgatgaggttgctatagattatacaagagagtaaggggttagattatggatatagaaaaaatagagcaaatgggaatggagcaggggttttcgcatgtggtgttgctggattgtgatacgattgagctgaagccggaggttcgacagatgtgtgcagcagatacctgtcataagtatgataagtgctggagctgtcctccgggatgtggctctcttgaggaatgtgaagcgaaagtccggcagtataagtatgggattattgttcagacagttggtgaattggaggatgcttttgatggcgagggaatgatggaaacggaagccagacataaggagtattttgtggaatttgagaagaaacttcgggagatttatccggatatgctggcgattggtgcgggatgttgtacgaaatgtaaggtctgtacttatccggatgctccatgcaggtttccgaaacaggctttctcatcgatggaggcttacgggatgctggtaacacaggtctgtcaggccaatgatctacagtattattatggggattgtacgattgcttatacgagctgttaccttctggaataatattttagccgaatcaagtaagtcccctgcggagcagttatttggtgtagagatgcgtagcgaagcggattatgaatatctgcttgactcaaatcaagtaaattctctggttactgttcactggtaatatcccgcgaggtgttttttgtgagcaaaggtcacagaaaacccgagatataccgcgcgaatttatgcgattagcataaattctgtgcatcgcgaagcgtgttactgagaatggagtgaacagtaacattctctgtggaggttgcggaaggggaagtcagttttcgttgtaaataacagtgagctatgataaaatacagatattgaaagcgcagagcgtgtttgaaaaaacaaaaaatccttcgccgcagggcgggggatttttggcagaaggtattaagggtggcttgaggatatgacagtactggaacagttaagaaaaacaattgaagacggacatccgggggagacagagaagctggtgagggaggcattgaagcagcatattcctgcagggcggattgtggaagaggccatgactccggctatgcgaacagtgggggagaattacaaatccaatggagcagatattattaaaattctggcagcagcccgaagtgtgcgcaagggttttgaattgttggaggaacaggactcgcagtttggcaggaggaatatcggaactgtgatccttggaacggtggaaggtgatctgcatgatgtaggtaagaatctggttgcgatcatgtttcgtagtgccggatttaaggtgatcgatctgggagtggatatttctgagaagcagtttctgcgtgcagtgaagcagaatcctgatgtgtcgatcgtgtgtatctcctcgcttctgagtacttcaatcccggagatggagcaggtggtgaagtctctgaaacgaagcagcagtaagcataaatttaagattatggttggtggaggtgcagtaacggagcagctggcgaagaatatgggagcagatgcctatacggagaactgtattgaggctgtggaagttgccaaaacatttattgtatgaagatatatggagcaggacttcgcgcctatgataactggattgttcgagaaatcaacttgtcggtacactatagcattgactgacaaaaatcgtgtaacaggaggacaggagacttgcggctgtcatcagtttatttatatgaaaaaatacaacagcagtatgaaattcaggagaagggaaatttatctggttcagacggatatctgcgcccttttttacgttgtggaataagtaaagaaggaaaaaagtcagaaaatggatttcagacaggacatgtgtatgtagttcagggttgtgatgcaaatgaatgtgagccggtaaattcgaaggcggaaaatattttctggattttctgtaaacgaaaggatactgtcagagcagaggagaatggagagactgtcgggaaaggagcttatattcaggtagcacttgatagtctggaagaaatagcagaatttatgaatgatgtgcaggagatttttgatgcggctgatgaatgggaacggaagctccataatttgatgttagaacatgccggaatggacaggcttttgcaggtgacatcggaatttctgcagaatccgatgactgtaacaggactggattttacctttgtggcggaagcgggaagcgagtatctgccgccgagggcgcggctgtatacagatgacgggttgaatatggaatatgtaaatgcgcttctgcagaatgaagcttatcgagatatggcagatacacatgaatatgtaatgtttccggcttatatcagtggatgtcgttcgatgaacagaaatctgtttgtggatgggaaagcaactcacaggctggttttgactgagtgcagatcagagattacactgagagttatctgtgtactggatattctggtggagaaactggagtatctgcttgcgcatgaagcggaggaagaagatccggacagagatatggagcagatttttgtcaggattctgtccgacaggactgcggattatatgcaggtgagcagagagctgagtgagctgggatggagcggaaatcatgaatatatgtgcctgatcctgcagatcacctatctgaatcagcagaatctttctacgaaagcaatctgtcggtatgttaagaagaaagttccggattcggtaggttttctttatcaggatgagattgtagtgttttttaatctgacaaaatcaggaatgaatcaggaagaaatagcaagtaagctgatttattttatccgtgatacttatctgaaagcgggatacagcagggtgatggaaggacatatgaatctgcggcgacagtatgtgcaggcgaagacagctctggatgtaggaagtcgtaagaagccttatctgtggattcattatttcagtcaggtagcattgacgtatattttggagcaggccaccagaagattgccgggaacaatgatctgtcatgaagggctgctggaactgaagaaacatgataaggagaatcagactcagtatatggaaacattgagagtgtatctggagcagcatctcagtgcaacccaggcggcaagggaattgtttatccaccgcagtacgtttctttacagactggacaggattaaggaaattctgcagtcggagctggatgatccagaggagattttttatctggaattgtcattcaggttgctggagcaggagcaagagaaagaatagtacgggaacagaatagtgcagatatctggaaaggtcaattatttgtggagggagatgcttcgataaaaaaattcaggtacgcctctgggcgtacctgaataaatattaaaagagatattatgttatttagcttcttcttcggcagcagcctcttcttcagcttccagagccgggtctacgtgaacggcggctacggatacaactgcagcttcaaggtctgtctttaagtctacatctttgtcctgggcgatggcgaggtctttgactttgattacgtcgccgactttcatgtcaccgacatctaccataattttgtctaccagtgctgatgggagagctctgaaggagatttcttccagatgctgctgtaatacaccggcttccagtttgtcgtggtttacaagtacgatctctgctacggaatgtactttctcgttgcttaccagtgcctggaaatctatttcatccacctgtccttttaacggattgaactggatttctttgatcagtacgtcatatgactgaccatctacatccagcataatctggcttcctttgttacttgtcttgagaagtttctcgacagcagatctctcgattttaacaggaagagaaccttccatctctctgccaaatacgttacctgtaacgtagccttctcttcttaatcttttggcctttgtgtccattgttcttttttcagcttttaaagtattcatttgacttttcctccattttacagctgaggtgacacgcttgacactatctttaatttatgagcatccgaaatgctccaggtggtgttaagtatttttgagtattcagttgtttgttctttatctttgttacagctgtattataacgcgctagaaataaaatgcaagaggaaaatgtgaagaatttgtgaaatcttataaatttggatgagacaaattgtgtatatctacctgaaatgttatatatagcaattccacaaaataatgcaatcaagacagatcatcagagtatggaatttaaataaatacaaacaaagcccccgaaagtgaccacttccgggggctttgcatttaatctaattaatcattaattacagagtatcatttcttctgatataaccaggctgttcagccggggaaacgatttcttttttatgaacgagtttcgcccatttgtcgactacttcattctctacgtgaacaccctcacctacagtaacttcagcgagaacaacactgtttcttacaacagcaccttttttaatgacgcatccacgaccgattacggaattctcaacagtaccttcaatctggcagccgttggagattacggaattcttcacatctgcagtattgaaatactgagtcgggcaggaatcattggtacgtgtatagattggccagttatcatggaaaagttcctgagctgacttgtaattaaggagagccatgtttgcagcatagtaacttgggaagtctgtaatgcttgcaaagaatcccttgtgtgcaacgccgcggatgtccagagtttcgcatttatcattcaggatgtctgccagtgtatacatggaagaaagattcttggcttctttgatcaggctgatgaaaagctctgttttcataacacaggtatccatataaacatactgattcttcttattaccatgattcggttcgatggattccacacctttctggcggttcagtcccagaacattacaggtaagataagcctcttttgcgttatcaacagcgtgataaagcagggtaacatctgcaccggactcaatgtgtgtatgtaaaaactggtcaaaatcaattgaataaaccatatagctcggggcaatgacaacatacggatgattcattctgctgagggattccatgttgtccagatagcaggagatatcagtattgtaaatatcattgtcattattgtgctctgagaagagaagctgaagtttgccgctcttggagttgatattgtaatgacgtcctgttccaagatgttctacaacagaacggggtttattattgatatagacctgaatacgttcaatgttgctgttggtcatattggagatagggaagtcaatgactctgtatctgccaaggaaagaaaacgcaccgattgggcgataatcctgcataccatctacataaatatttctcccggaagagcttacgattccaaatgccttatacatattattctgccccctttacgcgtttcgctacaagctcaatgtgctcactgtttgcggcaccgacaactgcacctttaccgatacggacaccgtcagctacaagtgcacgctgaacaacggcaccttcttctacaacaacacccggcatcagtacactgtcgataattctggcacctgcaccaatcttaacacctgtaaagagaacggaatgcttaacttcgccctgaacaacacagccctgtgtgatatatgcatctttaacatctgcttctgcgctgatgtactgtggaagtgcggtaacatcttctgtataaatcttccatgacggatcacccagatccagttcattcttggaacttaacagatccatgtttgcttcccagagagagtcgatggtaccaacatctttccagtatccttcaaatttatatgcataaagagttctgttatcgttaagcatagtagggatgatatccttaccgaagtcatggctggaatccggattcttgatatcagccatcagcatcttgcggaggagtttccaggtgaagatatagatacccatggatgcaaggttgctcttcggatgctcaggtttctcttcgaattctacgatacgtccggattcatcagtattcatgataccaaaacggcttgcctctttcatcggaactccgataactgcgatggttgcatctgcctttgcttctttgtgggctgcaagcatcttgtcatagttcattttataaatatggtcaccggaaagaacaagaacgtattcaggattaaatttatcaatgaaatcaatattctgggagattgcatctgcagttccgcgatatacattcagattctcatctgctttctcacgtggaggaagaacgtaaacaccgctgtttttagcatcaagaccccagcgtccgccggctgccacataactgttcagctggattgattcatactgtgtaagtacacctacaacatcaacgccactgttggcgcagttgcttaaaggaaagtctacgatacgatatttaccgccgtatgaaacggccggctttgccactttattggtaagatcatgcagacggctgccacgaccgccggccaggatcatggccaacatactattttgtttcataatagtgaaccctcgctttcatttgttatgtaatattatacattttttcctgacatttttccataggtttctgaaaaaaatatgtaaaaaatttgctacaaactaagtaaaatcgacgaaaaattatacattatatacaaatatcgagacgaatcgcatgacaggggattaaagatatttgtaaattatgcttataacgtaccaaaattcattccagattgcctgcggcaatggaattttggcctgtatgtctcgggattttggcatattcatgccaaaacacctcgcggaataatgctgtgtgaacagtaacatttgttcacaaatttaagtgaaacgggtggacgtataatagttcttacgctataataggtaggaatttatagaagaaacgcgtaactgtgaaaatactgaacagttacagagaaacagaggttatcacgtgagtaaaagagaagattataaacgatttatcgtattttgtctggcgagtctcgtggttctggcacaggcggcggtctttgcatgggtgtggtattccgtttacagaggacagatcgacgagcctttctggcgcaaaggtaactgggtactgatcgcaatctacggtctgatgtttgccctgtttgccaaattgtacggaggacttaaggttggatatcttaagaggattgatgtattttattcgctgacactggcacttttgtgtaccaatgtggtggaatatctggagatcaccctgatcaacagatggttcctgagcgtatggcctatgatcgagatgacaggaatacagctggtgctgatcattatctggatatttggttcaaggtatatctattccggactttaccgcgcacgccggcttctggtcatttacggtgaccgggatccgggggacgacctgatccataagatgaattcccgaaaggacaaatatgacatcagcggcaaggtacacatcagtgtgggagaagaaaaaatccatcagatgatgcaggattatgacggcgtgatcatctgggatctgcattcaacagagagaaaccgttatctgaaatactgttttgcacattctgtccgatgctatgtgagtccgaagatttcggacatcattcttatgggaagtgaacgcatccatctttttgacacaccgcttctggtatccagaaatatgggactggcagtagaccagcgtgctgcaaagagagttatggatattctgatctcagggatcggcattataatcacttcaccgatcatgctgatcatagcgcttgcggtaaaagcatacgacagaggtccggtgttttattttcaggaccgtctgacattgggtggaaagccctttaagatctgtaaattccgcagtatgtgcgtagattcggagaaaaacggtgcaagactggcatccaagcatgattcccgtatcacaccggtaggtcatgtgctgagaaatcttcatctggatgagcttcctcagcttttcaatgtatttaagggagatatgtctctggtaggtccgcgtccggaacgtgaaagtatcatgcttgagtatgagaaagagcttccggaattctattatcgtctgaaagttaaagcaggtcttaccggatatgcgcaggtctacggtaagtataatacaactccttatgacaaattaaagctggatctgttttatattgagaattattccttcctgctggatatcaagctgatctttatgacagttaaaatctttttccagaaagaagtatctgagggagtagatgacagacaggtaaatgcgttgaaggattccgggaaaaacgccggagtgtcagagaataaaacggaggaatgacaatgaataaaccgctggtatctgtgatcatgccggtttacaacggagaaaaatatattagaaaggctgtggaatccgtctatgaacagggagtttcgctggaacttctggtgatcgatgacggttctacagaccatacagaggaagtcctgtctgcctatgagggcagagaggactttcggtatattaagaatgaacagaatatgggagctgcaggctccagaaacagaggagtcgggctggcacagggaacctacattgcttttctggatgcagatgactggtgggagccaggcaagctgaaagaacagctgaaacgtctggaagagacaggatacgtgctgtgttctacagggcgggaactgatgaaagcagacggaagcagtacaggacggacaatccctgtaaaagagaagatcacctacagagaacttctgaaacataacagcatcaactgttcttcggtaatactcagaagggatgtggcgcgtgaatttcccatggagcatgacgacagccatgaggattatatcacctggctgaaaatcctgagaaaatacggctgtgctgccggaatcaacaaaccctatctgaaatatcgtctcagcgaaggcggcaaatccagaaacaaactgaaatcagcagccatgacttacaatgtctacagatacgccggttacggcaggatcagaagctgtatttttttctgttcttatgctgtacatggattatggaaatatttccattgactgaaatgttaagtttctattccataaatcgtaaaaatatgttatgcttgttgcagtaaatatgactttgcggttaattgcccgttacattgctgtgcgttttttgtctgccggtcatctgaagaatctggcagaatggggttgtatgttcacacagcagaagtcagaaatatgattagaggatagtacttaaacatgaaaataaaaaaagagagagcggcggtgccgtactcctgcctgattgataacattaaagttttgcttatctttctggtagtatttaaccatattattgcatttaaccttgtaaaggtagacactgtagtgagatatgtgtggtatgcgatcacgatttttcacatgcctgcatttgtttttatttcaggatatctgtcaaagaaacctcagaatgtgctgaagaattttaagaacctgctgatcccttatgttctgggatataccttaacctggtattcacagatatggctgggcagatctgtagattatgagatactgcgtcctaccggaagtgtcatgtggtatatactggcactgtttatttaccgccttaccattgaggccctgggtaagatcagatttattgttccgctcagtatcctgttcgcattatgggcaggaaccagaccggaatttaccacattcctgtcatcatcaagaatcgtggtatttttcccgttctttgttgcggggtatctctggaagagtgaatatatcacagcaatccgtaaatttaagggaaaatggatcctggtagcaatctccggagtccttttgtgggcgataccgaattatatgattccaaatgaaatgggaatcgctattttccgaggtaatcatggatatcagctctgtggcctgacggatcctcagggagtgatcctcagactgctgatgtatctggtatctttcgtagtggtctatacgatgcttgcgttagtgccggacatcaaactgccgctcacctatgtgggacgacatacaatgggaatttatttcttccattatccgatcatgatcattatgaatggtttatacatcctgatgcttcctgcaatgaacaatgtatgggtgcttctgggagtatcactggtatttgtacttgtactgggaagtctgcctgtggatctgctttatacgggtgttctgaatctgatcgcatttatcctgatcaagaaggataagacagtcagagatgaaggtctggaagaagagtatgacagcgaatatgatgaatatgaacttctcagaagaaagaaagccatcgcagagcttgcggcaacgcttgattcagagagtgagcaggacggacatgtggagaaagtaaatatggacgaggatacaccggatcatacttcttccgacagtcatgaaggcttcagcaatgtggccggcatggagttggagattgaagaggataatctggatgatatccctgatgaactgatcaaaggggaagaggagctttcgctggaagacctgatccaggaactggaagctactaccagaacgatggacgacaataaagaaccataaacacaaaggaagagttttgagatacaaaaacagtatttcaaaactcttctttttgtaaagttaatgcgaatttaacatttttgtaacggacaggtgacggaagttgggaagtatgatataatcaaagtatctatcgtatggaggttactgtgaacggagtgaacagtaacatatggagcaggaaaactgttcggcaaaataagaatatttttttcaggggagttatgacgaaagaatgaagagagtaatcacatatggcacttttgatctttttcataaaggccactacaatattatcaaaagagcaaaagcacttggtgattatctgatcgtaggtgtcacaagtgagagctttgacattgagcggggcaaactcaatgtgcgggacagcctcattaagagaatcgagaatgtgcggaggaccgggctggcagatgagatcatcattgaggaatatcagggacagaaggtcaatgacatcattaagtatgatattgatgtcctggtggtaggatctgactggagagggaaattcgattaccttaagaactactgtgatgtagtttatctggaaaggaccaagaatatttccagtacaaagcttcgcagtgaaggtgttatctttaatatgggaatcgtgacggataacatccgggataatgattttgtggaggaatccaaatatgtcagcggagttcatgtggaacgtgtattcagcgaggatcacgagactgcacagagattctgtgataaatatgagttaggttcctgctggaacagctatgatgaatttctggcagatgtagatattgtttatatcaagacatcgctgaaccggagagcagaatatatcgagcgagcgctgaagaaaggaaaatatgtgatcagtgattcgcccatgacactttcctcagagaaactgcgctacctgtttcaggtggcaagggagaacaatgtggttctcattgaacggaccacactggtctacctgcgggcgtttaatcagctggtatggctggtacacagtaacctggtgggagatctggtaagtgtcaaatgtgcgatctcccaggatgatttcgagggtggcaggacttttaatgagacggtctgcacagccatctgcgcagtactgaaactgttgggaaaaaaatgccaggatatcaacaccaatgcggtccgcaatcaggaaggccgttttgtatatgatatgatttccatgaaatacgccggtgcactggcgactattgaaatcggaacaacggttgacattgagaatgaacttgtgatcatcggaagcaacggcagggtaactatccctaatgactggtggaacaccggatactttgaagccaatatttcaggaaaagaatttctgaaaaggtacagctttaacttcgagggaaatggtttccgctatctgctgcaggagctgatgattatgatcagagacaaacggacagaatgtacccggcttttctatgatgagtcggtaagaataatagaaattttggaaacaatcaacagaaaggacaattcatgacggagaaacagaaatacctcctgaagcttttcagggaggttgatgaaatctgcagagaacataacctcagatacgtgctggcaggaggctccctgatcggagctctcagacatgagggatttgttccctgggatgatgatgtagacctttatatgccacgtccggactgggagaaattcatagagatatgcaaaacagaactcccgcctgacagagagatacagtgttcggaggtggacagaaactatacaaattcatttccgcgctacgcatccaccaatacctgtgccatccataagagccagattatcgggaaggactgtggcggagaaatcatagacattcttacactggatcctgttccggctgacgacaaagaatacgagaaatatagaacacacatgatgatctactcagatcttatcaatatttccgtaggttacagtgaccgctgggagatacctgcatccatgtatctgaagtatcttctttcttatatttttcttggtaaaaaaagaacactggcaaagcttgagaagatcatgttctcttataaagaagaggaatgtgaccgttatgccatgcgctggggcggctgcccatttcttttcgataaggatatgatgttccctgtaaaggagggcatctttgagggaaaaaaggcaatgatcccaaataagtgcagtgactatctgatctggcattatggagacgagtggtcatatatgcctcctcatgataagagggagggtcatgtagcagtgtgtgtagatgatcttccttatcaggagctacgtgaagaatacatgccgaagatcaataaggaaagattgcgctgggacagtgtgttccgaaagttctacaatatgcgcattgcgaaaaagagccataaggtccgccaggatgggcttgcaatgaaggcccgcgctgttgcactggacctgcagagagcgatcgatgaatcaggacttaagatcagagagctggtggaaagcagatctttccgtaagctgagtgcactttttggctcttattataagaatcagctcagtgctgactttatcggaagggaagactataccaatatttatgccttttatcatccgatacttgtggaaatacctgacgatgtattctatgcagcaatgctgactctgttttatacagaacgtgtatcaaaggcatatagaatgctgcagatccgtaagcaatgggatcatctgagctctgatatggagaaactgaaggaagatattgagcttttccggaaagcagcggatcactatgagtttcacaggatgaaggaagcagagcagatcatcagcgaccttttgcagaaatatccgggacatccgggatttatgaaatttaagtgcaggttcctgatggaggatgcgggagagaaccggatcgaagcagaacgttttcttgataaggctcttaagatgtttcctgaggatggttatttcctgaaatataaggcagatatcctctggatggatggcgagatgcagaaagcggcagagctttatcttcaggtaaagaataagacaactaacggaattgtatggatggagatggacagattcttcagaggatacaaatctgaaatcctgaaaagctgtgaagagcttattgcaaaccacaacaagaaggaggctctcgcattgatggagctgtggagtcgtctgatacctgaggatgatgatatccagggagcattatatctggcaaaaacagtgtgtgcacgtacgcagagcgagatagagaaagaaatcggtgaaatccgggctgtgatcggcacacagatgatcacgccagtcagtgtggagaaaaatccgggaaaaagcagaaaacagataaaatcagatagaacatcagatgaaacatcggctgatgatgtgaataaaaaagtatcagatccgtcagcagaaactgaagaagttaaagcgctggcggatatacaggttaaaggttcagaagaacatgagatgtacaggaaagctcttacaagagcatggaagcggctggggtattccgatgagcttgcagaactgcgcacccagatcatctgtacaggtgaggagagcgaactggagtggcttgcagaacaggtacgaaaccgtcagtttcgcagagaagagaaagcctgcgcttataagctggtgggtgatgtcaggatgaaacagggacagaccagggaggcttttgcaaattataagaaagcactggaatatgagatgccttcttatgtaagaacagagctgtaccgtatttttatcaatgatctgaacgatggcagcagacaggcgaaaagctttggaaagaagacggatattacagttgtgcttgataaatggcttgataaatatgaaagtattgaagatattaagaagatcgtgcagactgtaactgttaagtgacatcaatagaaatggagtaaagagttgaacaaaaaacaaaaggtgattttatcattattacaggaaatcgatgaaatatgccgccggaataaaatagaatattacctctctccacgactgacactctgcgcagtggaagggcatcctttcccacagaatcccatgtttggagttgtgctgatgaaaacagcggatatggaacggttccgtctggctgtggatgaagatccaagggaaaagagagcactggaatccatgaagagccacaaatggttctcaggattttatctgagatacaccaatacagatactctgtgcctgaatctggacaacaccagagactacgcattcccgggaataggagtcagtatttttccgctcagaacgccggcagcttctgtaaaagcagaacgcagattatccagagatgagaatgcatggacagagctctgtcatatcaactatgcagatagaaatttcaggagcagggtgaaccgtacaattatgcggctgcagtgtctgataaccggacgtcagggacaggcagcacatttgtatgacaggcttgtcagatcgtgccagcagcccggagcaaataaatatatcctcaaaagaagaaaacagactaccattttccctgcagaaatttttgcggagagtaaacgtgtcactctggaaggtgcagaactccaggttccggcaaaaaccgcagagtatcttaccataagctatggaaagaattataaagatgcaaaggaaccccgctatgtgacacccattgcgctggtggtcagtgcgagggtaagctatacacagttctggaaagaatccggaaactttgagaaatactgtaaagagcgaatgaaaaatgcccgcaaacttgccagaagcaggcggcacaaagactatttcaatgaatgctgggattatgtagagttctgtggggagcgcctgaatctgagtgtttcctatgagaagcagaaagactacattaagaacttgtataagaatgaagattatatgacacttgagagggtatttcgtccctatttcaagatgatgcagaagagtctgcagaagaatgaactctttgcagaggacgaagagatttttgacatctatgtagacgtactggagaaaacaggaaagacagtacagagaagtaagatcggcacgctgatctgacgggagggaatatgaaactttcagattatattgttacgtttttgcagaaaaaaggaatccgtcatttctttggataccagggaacgatgatcgcacatctggtagattccattgaaagaaatccggagacagagaatcattccagttacaatgaacagggggcagctttcgcagcctgcggatacgcacaggcgaaggaagaatgtgcctgcgcctatgctaccagcggaccgggagccatcaaccttctgagcggtgtggcagatgcctattacgactctctgcctgtgatctttctcacaggacagctgaacacttatgagtattcagggattaaggggctgcgtcagcagggatttcaggagacagatattgtggcaatggcgaaaccgattaccaaatatgctgttcagatacaaaaccctgaggacattgtggaggaattaaataaagcataccatattgcaaccacaggacgcagaggaccggtgctcatcgatcttcccatgaatatccagagaagtgaagtggagaatccggtctatgacatgacttttgaggacaaacatacagatgcagctgcagcacagcaggcggcagatacgattctggaagcactggaacaggcaaaacgtccggtgatcatgctgggccatggcgtggacagcagcttcagccagcagaaactgatccgctttgcacagaagagacagattccgatcatcaccagcgttctggcgaaatcagttctgggatacgaccatccgctgaatttcgggtgcatcggcggtgcctatggacaccgttatgcaaatatgatcgccaatgcaaaaagcgatctgcttctctgttttggcatttctctgtgtaccagacagatcggaaccaaagtacatgaatttgccagaggtgcaaagatcatacgtatagatattgatccatacaatcttcagagagatatccatgagaatggtgagaatgaggtaaagcttcaggcagagacaggagcagtgattgattgtcttgcaaaagtggatgatcctgatatagagggtgtaagtgactggttgaatgtctgcacagagattaaagaaaatcttcaggcagttgatgatgccacaccagaaagatatccgaaccgtatgatcgcagacctcagtgatatgctggaggatacctccgcgatcgcagtggatgtaggacagcatatggtatggagttaccagtcattcaagaatcatgaaggacagaaacttctcttctccggcggacatggagctatgggctatgggcttccggcagctatcggagcgtattatgcaaccggaaaaccgatcgcctgcatctgcggagacggtgcactccagatgaatatccaggaactggagtgggtgaagagagagaatcttcctgttaagatcatggttatgaataatgaagcacttggcatgatccgtcacctgcagagagattattttgactgtctgttcgcaggaaccacagacggctgcggttttgcttcctgtaatttcgcagaggtggcaaaggcttacggcattcccgcactgagaatgctctgcgatgcagtcagagaagaagcaccggaatttctggaaggggaaggcccgaaacttctggaagttatgctggagcatggaacttttgcatatccgaagacctgtctgggtgaaccgatccataatcagcagccatatgcaccgaaggaagtttatgacagactgatggaattgtaggagtgaagaatatatttcggtaatgtggaatatataatatagaaggaattttttgcagtcagttcgttttatggaagtggggagactcccgcatgacagagaacagatctgtctgtattatagatgaataaaaagagggaatacaaaatgagcaaggtaacagtgatcacaggcggcacctccggaatcggacgcggtattgtggagaagatactggcaaattcagcagaagatgatctgatctttgccacttacgctcacaatgcatataaagccaatgaattttgggacagcctgaaaccggaagaccaggagaaacttattattctgaaagcggacatgtcttcctatgacgatatgatgaatttcgtcggagaagtaaaagagaaagcaggacacatagactggctgatcagcaatgcgggaatcagcacttacgataaatttcaggattacactttcgaggaatggaataagatcgtaaataccaacctgtctgtacctgtatttatgatcaaagaatttatgcctgttatgacagagggcggaagagtactcttcatgggttcctatgcagggcagcaggcatactcctcctctctggtatacggcgtgaccaaggctgccatccacttccttaccaaatcgctggtaaaggaatttgagccaaaaggcatcacagtcaatgccattgcccccggtttcatccagacgccctggcatgagaaccgcacaccggaaagctacgaacgcatcaaccgcaagatcgcactgcacagattcggtgagatcaaagacgtggcggatatggcgtacagtatacttaccaataactacatgaatggaagtattgtggacattcatggtgggtatgattacttctgataaagttaaaaaaagaatccccgacagatttttctggcagaaacttcggtttctggtgtttcggttgtttttcagtttgtaaatgtaacaatcttatcatcatccgccacctgagattcagatttatagtcatttttcccaaccttacatttgcttttgacaaaagaagagtatttcttctgtttgacaatctctccactggttcatataatgaaatataagacataactgccagtctatagaaaggactggcagtatatgactttatcataggcagaacgagagcggaggagagaaagctgcgtatgaaaagatttgatgataagaacggcacagatgataaaaagaagcgaaagcggattctgtttatggcaggactgatcgcagtgattatcatcacagctgccttattttattttaacagttttgtgatgaaaacagagaattccagagccagagattctcttctggaatggacagagcagaatgcagcacttgtcggaagccggattgatatgtactatgatcttctggaatgtgcggcagattatatcagtgatatgcctttagatgaagtacagacagaggagatgctgagggagaaatttcaccgtcacacagagaagtttgattcgctgaagattatcagtgaggatggccgctgcgtgcaggacggacaggcttattccctgaaagaatacttcctgatggctgtgttaggtaacaggggtctggcagaaaatggatattcctatgcagatggagtgatattgtcagtacctgtcaaaaatgaggcacagcagattaagggagtgctctgtgggacgcttccgtgcagcagtctggacgtatatggaaaggcagaccgtagaaaaggatatgcagggctttttgtgatagataatcatggaaaatatattgtgtctgatggcggcaatgacacttttggtaatgattttctgacctggctggaggggcgtgaactgagtctgccgatttccgatattaagtcccagatggacagtggattccgatattactttgcgatttcagatgaagatggagattatatggtgactgtggcacctgtggacggtacgaagctgtttgcggtaacaatggctgataacaggtatattcatcaggcaggactcagataccggatatgggtatttgtgattacactggtgatcatcctgagtcttatagtagttattggagtttatctgtatttccggcgtgaggacaggattgctatccgcaatctgaaccgtcagcttatgctgaatgaggaaacttaccgcatcacagcaagggagagtgatctgtgcgtttttacctatgatgtggaaacagagcagatacagtttctgaatgacaagtatcagaatctggggctggatcagtcagaactcagcgtaccggtcctgcttcggaaaatcagagagatcaatccggaaacctgttctgtgatcagggatatatttgccagggcagattctgctgaagctttgcattcacagaaggtgaaggtgtgggcaggaggacgtatgcggtatctgcaggtcaagactacgaatctgtacgatgaatcgggaaaagtgtcccgtatggtcggcagtatcgaggatgttacggatatggagaatgatatgctcaagcttcagaaggaggcaaggacggatcttctgacaggtgccatgaacagggcagcgggcacatctgccataaaccggatgcttgtgcaggaacttcatccgggatgtgtaaatacttttgctattgtggatctggataatttcaaaacgctcaatgatgtcatgggacatatgtggggagacagggctctctgcgaggttgtcctgatcatgaagaagcattgcagggctcaggacatcgtctgtcgtctgggcggtgatgagtttgtggtatttctgccggatatgaccagggaagcggcggaggagagtctgcgtgtactttctgcgaagctgcatattgattatgtgaaagaaaacctggaggtaatgatctccgcatctatggggattgttttctcagatggaagagatatcactttccaggacctgtatgaggaggcagacggatgtctgtatcaggtgaaacgtaccttcaagggttcctatcatatttcagacagagccgaccgggtaaaggcagattagggaagttcttgtaaaaaatatgtgatgaaatataggcataaataataagaaaagacttgacttaggcatgccatgtgtgataaacttgacaagcgacatggaagttaggtcttttttttatgcccgaaaagatgacggatacatcgtccggcatgaggaaaatgaccatgcaaatgaaaacactggaggtggaagttgtgcgcgttaagattacattagcatgtaccgagtgcaagcagcgtaactacaatatgactaaggagaaaaagaaccatcctgagagaatggaaactcagaaatattgtaagttctgccgcaaacacactctgcataaggaaacaaagtaatccaaggtaactggacgaaacagttactcacagagaattgtgaggtcaggctatgcaaggaaatgaaaaatctgctggcaagagccagaagaagagttggtttcagggacttcagtcagaattcaggaagattgtctggacagaccgcaatgaactgattaagcagactatcgtggtagtttgcgtgtcgatcgtgctttgcgtactgatcagcgtcatggattcatttattctcgaaggcattaatcttttaatgaaataaggataaggtgattgtatgtcagaagcgaaatggtatgttgttcatacttattccgggtatgagaacaaagtaaaagtcgatattgaaaaaaccatcgaaaacagacacctggaagaccagatccttgaagttcgtgttccgctgcaggaagtggctgagctgaaaaacggggctctgaaacaggttcagaagaaaatgtttcctggctatgtacttctcaacatggttatgaatgacgatacatggtatgttgtccgtaacaccagaggtgtgacaggcttcgttggaccagggtccaagccggtaccgttgaccgaggaagagatgcttcctcttggtatcaagaaagaggaaattcaggtcgatttcgcagagggtgatacagttgttgtcacaggcggtgcctggaaagataccgttggtgttatcactgcccttaatgtgcagaaacagacagcaacgatcaatgttgaacttttcggccgcgaaacgccggtagaaattagtttcgcagaaatcaaacagatgtaacaagcaaaggtaacaatatcgtgggagggaccataaacccccgccaataccacataggaggtgccgaaaaatggcaaagaaagtaacaggatatatcaaattacagattccggctggtaaagcaactccagcaccacctgtaggtccagctcttggacagcacggtgtaaatatcgttcagttcacaaaagagttcaatgcaagaacagcagatcagggagacttaatcattcctgtagttatcactgtttatgcagacagaagtttcagcttcataaccaaaactccgccggctgcagttcttcttaagaaagctgctaagatcaaatcaggttccggcgtaccgaacaagacaaaagttgctaaggttactaaagctcaggttcaggaaatcgctgaacttaagatgaaagacttaaatgcagcatcccttgaagcagctatgagcatgatcgctggtactgcaagaagtatgggaatcgaagtagttgattaattttaatattaaatagtaagtgggagggcgttccccgcaaataccacaggaggttatagaaatgaaacgaggaaaaaaatacgtggaagctgctaaagcagtagaccgcgctacattatatgataccgcagaagctatcagcttagttaaaaaagctgcagttgctaaatttgacgaaactatcgaagttcatatccgtacaggctgcgatggacgtcatgcagaccagcagatccgtggtgcagtagttctgccacatggtactggtaaaaaagttcgtgttttagtattcgctaaagatgctaaagctgaagaagcaaaagcagcaggtgctgaattcgtaggagctgaggatcttattccgaagatccagaacgaaggatggttagactttgacgttgttgttgcaactccagatatgatgggcgttgtaggtcgtcttggtcgtgtacttggaccgaaaggtttaatgccaaacccgaaagctggtacagtaacaatggacgttactaaagcagttcacgatatcaaagcaggtaagattgagtaccgtcttgataaaaccaacatcattcatgttccggttggtaaagcatcctttacagaggaacagttaagcgacaacttccagacgctgatcgatgctatcgttaaggctagaccaagcacactgaaaggtcagtatttaaagagcgttgttattactccgacaatgggacctggtgtgaagatcaacccgatgaaattagcataatagattttagcaatttaagactctcggagatgctccgggggtctttttgcgtttctttttgggggtggcgggtatggggacgcacaggaaaatatttgttttctgatacggctgcggaggcaggaatactaagcttccggaaatttgctaaaaccatgccggaaaaattcaaactcgcttcgctcagacagtgaatttttccagcataacgcaaattcccggaagctaagtattgctacacctcctgtagatgtatcagaaaacagatattttcctgcgctgtacaatggtttcgcaggcgggggaaaacggaaaggtattggatatagggagaaagatgcaatgtatgggtgtgcaggaatggaagattacaggatttggtaagggtgtgttatagtagggggatgaattagagatttgttagatatattttttctgagtaatgttatagaggcagacaggaggcgttattgtggctggcaggagacagaaaaagagcggtggaagaagttatgcgtggagataccggggcaggattgtggcttgtgtgtttgttgaggtgatcattatctgtgcgctggttatcatgatcggatggaataagggcgtgaaggagtggtttgagcagtttgagcagccggttctgaaggaagtggatatcagtggtatcaacagtccgaatgcgatcctgatgcaggccaggggaggtaagattctgggtgagattaacggggaggctcagatttatccggcttctatgacgaagattatgactgtgatactggggattgagaattttgatgatctggatgagaagattactctgacggatgagatgttctccggattgtatgagcaggatgctacacaggcaggttttcagccgggggaagaggtccgggtgattgatcttctctatggtgcgatgctgccttcgggggcagagtgctgtattgcgctggcagatacgatcagtggttcagaggcggattttgcggagctgatgaataagaaagcaaggaagcttggaatggagaatacccatttctgtgactctacaggactgcataatccggatcattacagtacggttaaggatattgcggtgttgatgaagtattgcattaagaatgatacgtttcgtgagattgtggagacctccagacattctaccggagttacaaatatccacccggatggaattacttactacagtacaatgtttaaaaatctgtctgatccgacagtcacaggtggaaaaatcctcggtggcaagaccggctataccagtgaggcagggcactgtctggtgagttttgcggagattgagggcagggaatatatctttgtttccgcaggtgcttccggagcagatggaaatacgattccgcatattcaggacgctgtgactgtttataacagggttggtgcggcgattgaggcgaagatgaatgataataataaataaaatctcccacaaattgtgacgcacatcttgtggggagcattttcgttactgttcactggtaatatcccgcgaggtgttttttgtgagcaaagatcacagaaaacccgagacataccgcgcgaatttatgcgatcagcataaattctgtgcatcgcgaagcgtgttactgtgaacggagtgaacagtaacgcattttccaaatacactctaatgtttatagatttttatagacatatttttatgtatgtgatataatcaatcacatacaaaagaacgatacgggctacagaggaggtgaaagtggtgacagacagacaaatactggaagctgttttgacagaggtcagaggatttgggacgcgaatggataaattcgaaagtcgaatggataaattcgaaagccagatggaccgaatggaagagcgtcagaagtgttttgaagaagagaccagaaataactttgcagatatcaaactgcatttggagaacataacggataggaatatttctatccttgcagagaatcatctgaatcttatcaataagatggatgtgtcggctacctggatgaacaggattatgattaatgaagttaagatgaatgctctgacagatcaggttgccagacttcaggcgaaatgcagttaagcttccaatgatgaaaatacgaacggataaaaagggagaacctcaatggttctccctttaaaaggtttattttatgcgattttccgatagaattattctccgaaatatcttttaagaagacctgcgaatgcttttccgtgtcttgcttcatctcttgccatttcatgaactgtatcatggatagcgtcaaggttagcagcttttgcacgtttggcaaggtctgttttaccagctgtagcaccgttctcggcttctacacgcatctgaaggtttttctttgtgctgtctgttacaacttcacctaataattcagcgaatttagcagcatgttctgcttcttcataagctgctttttcatagtataaaccgatttccggatatccttctctgtgagcaactcttgccattgcaagatacataccaacttcagagcattcaccctggaagtttgctcttaaatcagccatgatgtcttcgctggatccctgagcaacacctacaacgtgttcagcagcccatgacatttcgccatcctgctttacgaatttatcagccggtgccttacatacaggacaggcttccggagctttctcaccttcataaacataaccacatacactacatacccattttgtcataattaaaatctccttttctttttaatgaatttattagggatgccagaaaataaattgattatctcagcatcgtttagttcttactgctttccgtctgtgcggtagaaaaagtaattttttaataatagtaattattactgtttctgtgatttaagattaccatacttgattgaaaaagtcaagtttaattttagcttttttgcaactttttatcattagttgttattcccaatttggccactaatgatgtaagcaaaaactactttgaactatcagagttgccttctgtctctttcaggcagtcctcacacaggccgaagaatctggcactgtaatcagtaatctttcctttgaagttctcacctgcaagatccataatgtggtgaattccctcgctctcaaggtcgatgatccgctcacatctgatacacatgaagtggcagtgcctctcggtccgcccgtcaaagtgatccgctccggcgaaagaggaaagcttcttaatctctcccagatcagccagcagagataagttgcgatataccgtaccgaggctgatattcggatagatgagcttcatattctcatataccacatcggcagtaggatgatctgttctggttcttagaaactctttaatcgattccctctgacggctgtatttcagtgtcgccatggtattcctcccttccctgtttactcgcaaatgatttatcataactgttcaggatagttgcagttataatctattcaataacgataatcattactgatattgatactatacaatattggattgaaattgtcaagatataaaattattattttatagaattgttatagtttggctacgttactgagaatggagtgaacaataacgatgtgggtttacaaatccaccaaaatgtgctatattttccctataacaggaaataactatttcctatagctaacagcgttccatgatcacagagcggagtgctgtcacgaaataacacaaactcattgaagaagagagtagatccgcagaccgtattacagagaaatccccatggatcatatatcacagattcaaaggctgagagggatatgcaaggagcaggttgaagatggcttccgagaggcactgctgagagccaacagctttaggcagcgacaggcacgcctgttacagcgtagaggtatcacaatgtacctcccaaggtttccccgcgcgagcccggaaacgaacagaagtggtaacacgggtaatactcgtcttctcagataatctgaggagacgttttttatgttataggaaattactctgtaatgttcctataacataaaaaagccctccgggcaggatcacactgcgacagagaggaattatttcccccaacaccagttccttcctaccatgaagaatttatgtttttcttccataaataaggagcagttgttaccatttcaaaaatcagcctgggaaattatttctctttctatgcatttgcagggatcgtgtaaatcttagtgcctggaaatctgcgttatgaacaaaaatctcactgtctgagcgaagcgagtttgagatttttgcgaatgcttttagcagattttcagacacttagagttactagtacatcgttttcgaaataactataccactcacttgtctgcgaatccgattgcacaggtctaaaagcctcagcgtagcccgctacgcctgcgtttttataccagcacactcgaatccgcatcctacgcgattggtatagttatttacgaaacgatgtactagatcccgaaaccgcatagaaagagaaataatttcccgggcgtccacattaaaaaaggagacaacaaacccatggaaaaacagaaatactacatcaccaccgccattgcctatacatctggcaaaccgcacatcggcaacacctatgaagtagttttagccgatgccatcgcccgctacaaacgtcagcagggctatgacgtattctttcagacaggaaccgatgaacatggtcagaaaatcgaattaaaagccgaagaagccggaatcaccccaaaagaattcgtagacaacgtatccggtgagatcaaaagaatctgggatctgatgaacacatcctacgacaaattcatccgtaccacagatgaagaccacgaaaaacaggtcaaaaaaatcttcaaaaaaatgtacgcaaaaggcgacatctacaaaggacactacgaaggaatgtattgtacaccatgcgaatctttctttacagaatctcagcttgtagacggcaaatgtccggactgcggccgcccatgtgtacctgcaaaagaagaagcatatttcttcaaaatgagcaaatatgccgacaaactcattgactacatcaatacacacccggacttcatccagccggaatcccgtaaaaacgagatgatgaacaacttccttctcccgggacttcaggatctttgcgtatccagaacttccttcaaatggggaatcccggtagactttgatccgaaacacgtagtatatgtatggcttgatgcccttacaaactatattacaggaatcggctacgactgtgatggcgaaagcacagaccagttcaataagctctggcctgcagacctgcatctgatcggtaaagacatcatccgtttccatacaatttactggccgattttcctgatgtcactggatctgccgcttccgaaacaggtattcggacatccatggcttctccagggtgatggtaagatgagtaaatccaaaggaaacgtaatctatgcagatgaactggtagacttcttcggtgtagatgcagtccgctacttcgtacttcatgaaatgccattcgagaatgatggtgtgatcacatgggaactgatggtagagcgtctcaattctgaactcgctaacacccttggaaaccttgtaaaccgtaccatttccatgtcaaacaaatatttcggcggtgtggtagaaaacaaaggcgttacagaacctgtagatgatgatctgaagaacttcattctctccgtacctgccaaggtaaacgaaaaaatggataaactccgcgtggcagatgcaatgacagaagtattcacaatcttcaaacgctgcaacaaatacatcgacgaaacaatgccatgggctcttgctaaggatgaagagaaaaaagaccgtcttgcaacagttctctacaatctggttgagggaatctgcattggtgcggttctgctgaaatcctttatgccggaaacaacagagagaatccttgcccagttaaatgcacaggacagagaactggaagaccttaagacctttggcctctatccgtcagaaaataaagtaactgaaaaaccggagattcttttcgcccgccttgacctgaaagaggtacttgcaaaggtggcagagcttcatccgccgaaagcagaagaacctgcaaaagaagaaaaagaagacgtaattgatattgaagcaaaacctgagattacatttgaagatttcggcaagcttcagttccaggttggtaagatcatcaaatgtgaagaagtaaaaaaatcaaagaaactgctctgctcacaggtacagatcggcagccaggtgcgccagatcgtatccggaatcaaagcacactacagtgcagaagaaatggtaggtaagagggttatggtagtcacaaacctgaaaccagccaaacttgccggtgtactcagtgaaggaatgatcctctgcgcagaagatgcagacggaaacctttccctgatggtaccggaaaaggaaatgcctgcaggtgcagaaatctgctgatctttgtattactgagaacaaagcgaatggtagcgaaaatgtgtgaaaacttacgaatattatcttgacaaatacactctcaaaagctatattaatatttagataaaggggagtgactgactcatgagtattcatggtgtcgtcaatttcggtgggtaaagactccaaccgtatcgtgatgaacaggcgaggcttttattgtatgttcccgtacaataagagcctcgctttttgtaaaaacttaaacagggggattttgatcatgtcacagggttttaatcattttgatgagaacggaaacgcagttatggtagacgtttccgggaaaaatatcacttacagaacagcagttgccacaggcgagattcatgtaggagaagcaatcatggaggctgtgaaagagggttctgtgaaaaagggagatgtgcttggagtagcacgtgtagcggggattatgggagtgaaaaggacttctgagttgattcccatgtgccatccgcttccgatccagaaatgttccgtagactatgaactggatgagacaaacggaattatccgcgctttctgtacagtgaaaacagaaggcaagaccggtgtggaaatggaggcactgacaggggttcaggtgacgcttctgacgatttatgatatgtgtaaggcaattgacaagcatatggtaatgtccaatattcatctggttgaaaagacgggcggtaagagtggagattttcatttttgatatccacaaattactttgcgatttgcaaaatatttgttgggtaaaatgaaagaaatgtgtataatggaaatacagaatggcagataacgaaaaaaattatctgcccgacagggaggtttttataaaatgaaaagagtagcgattattacatccagtgatacgggatatcgcggagaacgtgaggatttaagcggacctgcgatccgagagattgttgagaagaatggatatgaggttgtgtctgaagatgttctgccggatgacagaaagatgttgtcagagagaatggcggaaattgcagacagcggcacagcggaactgatcctgacaacaggcggaaccggtttttcacccagagatattacaccggaggcaacggaggatattattgacagacgtgtaccggggattccggaggcaatgcgtgcgtacagcatgactatcacgaaacgcgccatgctcagccgttctacggcaggtatccgaaaaaaaacactgatcatcaatcttccgggaagtccgaaagctgtaaaagagagcctggagtatattattgatgcgcttggacatggcattgagatcatgacaggggaagcagggaactgcgcaagataactgatggcgataacagggataagaaagcagagaatataagctgacggcaataaacggaagagcaggtacgaaaacagtatctgaaactaaaacaggaaggtgaaagggataatcttatgggaaaagtaattgcggtttgtacaagtgaaagaaagggaatagagaagacaagtgttccggagattaaagtaattgaggactggggaatcgagggtgatgcccatgccggcaaatggcaccgtcaggtaagtctgctctcttttgacaagattgaagattttcgcgccagaggtgcagaggtagaagacggggcattcggagagaacctggtggttcagggaatcgactttgccacacttccgatcggtacgaaattccagtgcaatgatgtagtcctggagctgacacagattggaaaagaatgccacagcggatgtgcgatctttaagaaaatgggagagtgcattatgccgaaacagggagtttttacgaaggttattcatggcggtgtgatccatccgggggatgaactggtaattttataacagattttttaatcggactatagcaattccataaattactgcaaacaatccagtccatcatagcgtgaagtcctgctgaactgtcttgattgcattattttatggaattgctataagattacatgaggagataggaaaaaatgattattgatacacatgcgcactatgatgacgaggcctttgacacagacagggaagcgcttcttatgtctatgtacgatggagggattgagaagattgtgaatgtctgtgcatctgtaggcggttttcaggatactgtgaagctgatggagaaatatccttttgtatatggagcagtgggaatccatccggatgatgcagataagatgacacaggagactctggatgagattcgcagattatcccatatggacaagatggtggcaatcggtgagatcgggctggactattactggcataaggaagaagaggaacatcagatccagcagaagatgtttcgcgctcagcttgatattgcgagagaagagaagcttccgtttatgatccacagcagagaagctgccgaggatactctgaatattgtcagagaatatatgcagggtggtatgtatggcggtatcattcattgtttttcatacagcagggagattgcagcagaatatctgaaaatgggactgtatctgggaatcggcggagttgtcacttttaagaatgcaaagaaactgaaagagacggttcagtatgcacccctgtctcagcttgtcctggaaacagactgtccctatatgtctccggagccaaacagaggtaagagaaattcgtcattaaatctgccttatgtagcacaggcaatcgcagaactgaagggaattacagcagaggaggttattgatgtgaccagacagaatgcagagaaactgctgggaattcatcaataaccactgtcatattcgtttgaagaatcatctgaattttcatccgaactttcatctgaactttcatccgaactttcatctgaactttcgtccgaactttcatctgaactttcatctgaactttcgtccgaactttcgtccgaactttcatccgaactttcatctgaactttcatctgaagagctgtcagaaacgtcggaagagtcttcggttccgtctgatgtgtctgcctgatattcccaggagtggatggattctgtatcttccactacatttccggtagttttgtcaatcatgttgccctcccagtcaaacttgacgttcagcaggtttgtatttgtggaaggcttcacattcatggacatgatttccttaaatttagctttcaggttatcgagagtaaactcatcaccgatcacatttcttacactgtgggaagaagcaagttcttctgtataatcatccagcatatatggtccgtattctccgttatcgtaatcataatgcatgaccataggtttcacttccggagaaaggatctggatggttgatttgccgttcagagttgatttctgtatggtaaaacttgccattccttccagaagttccgggagttcctgctgggtggaaacgaagtttccgagggagtagaatatggtggtattgtgtccctggtcatcagaaagctgtccgtaaggctgaagcacatgcggatgaccgccaatgatcacatcaacaccctgctgcatcagaaaagcggcccattgtttctcgtattcatttggcatggtttcatcttctgttccccagtgagccacaaagatgatgcagtcgctgatttctttggctttctggatcattgtggtgatcttatccttatcaaagatatcgatcatgtactcatatccttcgcctgcaccggaattattggtgccgtatgtatagtcaagaaaagcaatcttaataccattcacttcttttactttgacagtgtctgcatcttcctgggtggcgtggatgccaagtacaggaatatccggataattggtgctccagaaatccagagtacttttcagatagtcatatccataatcatcggcgtgatttgtggcagattccactacatcaaaccctgctttgataatggcatctcccacttcctggggagtggcaaaagaaggataagtgctgacagcatcgtggcttggagcaaaaaccgtttcctggtcgatcatggctacgtctgcagcctggatctggtccagaacatgagtgtagatatggtcataattccatatgccggagtcattttcgccggattcatacagcttgctgtgataaagattatctccaacagcaattacacttgcagtggagatgacaggtgtttcagctttgatcttatcctgctgttccttgagagccgctgcttctgctgcttctttctgcggtttacggatcagggtgtaatccatctgatgcatcaccagaacgagcagaaccagaacaataacagaacacagaagactgatccgggagttgattctctcccgtaaattaagtggcatattattttttttcatagaaaattccctttaactaaaatagttcttaacagtgagaatgctgaacagttacagcaatctgcagcctgtattgctgtcctcagtaccgtatctcaaattcattgcagactgcatacggaaatgagacaggagcgtgtgaactgtaatctatctgttcattataacaaatttcatggttcaaagaaagaattaagagagaaattctttgaaaacctgccagaaatgctttgtgagacaaagtattttagtgtataataggtagcaatataaccataatgtacaaacatgctacagcaatgctatatggaattgcttaagcaaaaagagggaggtaaccggatgaaccattatgaggcaattaatgatgtactggtcaatttatttaatgagattctggacctggaagaacgggcattgattacgggagaatataagaatatttccgtcaatgatatgcacattattaatgcagtaggtatccgggaacagaagaatatgtcaacagtagccagagaactgaatgtgactgtgggtacattgacgatcgctgtgaataatcttgtaaagaagggatatatccagcgtatgagaagtcaggaggaccgaagggttgtgctgatctccctgacagaacaggggaagaaagcttattaccatcataaagatttccatgagaagatggtactggctgtacttaaaggcctaaatgtggaggagacagaggcattgacgaaagctctgaccaagctgcaggcatttttcagatcatatcagtagaaggagtaaagatggaatatactgagaaggatttagtaaagatcgcaaaaagggaaaataatacgaagagaaactatctggtagtggatccgcttcagggaaagcatattccggtagtgccatcaaaggcactggatttatttgctgctctggcagatactttcagggagaaatacaaagatgaaaaacttttgctggtgggctttgcggagacagcaactgccataggtgctcaggcagcgattactgtgggggcagattatattcagaccaccagagaagttattcccggcgtgaattatctgtttttttccgaggaacacagccatgccacagagcagaagctggtaaaagatgatattgacagagtagcggcggagacggatcggatcatatttattgaggatgaagtaactaccggaaaaacaattcggaatatcatcagtattcttgacagggaatatgacggaaaatttaaatattcagtagcatctctgttaaacggaatgagcgaggagaatctggaacgttataagagacaggggatttctctgtattatctggtaaaaacggatcacagtacttacggagacagagcagaaacatttaagggagacggattttattataaatgtccggataaggccgcagagtatacaacgatttatgttaaagaccggatggatgcccgcagactgattgattccgggaaatatgaagaagcatgtgagaatctgtggagagaaatccgggagaaaaccggaaacatggctgataatatatctggcaaaagaatactggtgatcggcactgaggagtttatgttccctgcactttatatcggaagaaagatggaaaaagagggagccgaagtaaggtgccattcgactacaagaagtcccattgctgtgagtctggaaaaagagtatccccttcacagcagatatgaactgaaaagtttatatgatccggacaggagaacgtttatttacgatataggaaaatatgacaaggtattgattgtcacagattccccggaaataaaggagagtcaggaaacgctgataaatgctgtccggatgcagaacaaggatattacagttgtaaggtggtgctgatttgagaagttcctattcagaagaagatgtgattttattattgaaggatattaccgggctggtagaacctcagcctgccaaagtgcgggagaaactgattcagtccggaaaacattacagcgagatgctgcctgttgaatatgttcctacagatcagtatatgcaggtatatcataatgcgctgaaacattatgcgaagccggttgccaatgcagtaggaatgctggcagataagatcatagagaataagggaaagaaaattgtcctggtatcccttgccagagcgggaatcccaattggtatccttgtgaagcgatacatcaaattcaaatatggtataaatgtgccgcattattccatttcaattatcagaggaagagggattgacgataatgccatgaagtatctgcttgaaaagtacagaccgcagcagattttatttgtggacggatggattggcaagggtgcgatcctgaatgaattgaagaaagatatctctgcatatgaaggggtttctgctgacatagcggtagtggcagatccggcaaatgttacggagctttgcggaacacatgaagatatcctgatcccaagttcctgcctgaacagtacagtatccggccttatcagccgtacttttctgagagatgacataataggcagagatgatttccatggggcagtctattacggagaactgacagattctgatctgtcatatgactttattgaaaccattgaaaaggaatttaatatggagaatacacctgatctggaaaaaagagtggaaagtcagggtattgatgaggtaataaatataggaaagaatttcggtattgacgatattaatctgatcaaaccggggatcggagagacaacaagagtattactgaggagaattccctggaaggtgctgatcgatgagcgatataagggaaatcctcagttggagcatattgtcagacttgccgaagagaaacatacacctgtagaatactatccacttacacattataaatgctgtggaatcattaagaagcttgcggatgcgtgagaagggtaatacttattctgttattccgaaaacttctgaaagataaactgttttcttagcccagttcagatgggttttatattcattcattctttctctggttttgcttcctgcaacaagggaagcagaatcagcattccagtttaaaatcgcccgtgcgtcaaggtagtcatttcgtgaaacctgataagctctgtttactacagggatctgtgaagggtggataacggtttttccgatgaaaccgcaaagtctgtcctcccggatttcctgaatcattccttctttccagctgtcaccggcataatattcccatacaggaccggaaatcacataatccataccatatacagtgataatatctgagaaaatatctgaaacaggtctgatgctgtgaatagattcattggcatgtctgcgaaacccaaacatatggcacagatcatttccgccaacacgtatattcagtataagatcttcaattctggctaaagaatcccttaacaaatagagaatatcaattctgtttcgcaaatctataatggagggactttcgtaaataggcatcatgtaaagtttttttgcgacaagttcattgacgaggatcatctgctcaatataactttgtgcgttatccgggctgaatttagggacgatgaaaccggtaacaatcttaatggattgcccaagagcttttgttaatctctgaatctgctgtggattccgaacccggataaatattttgggcagatagaatggcttttgttcatgctgtatgaatatctggctgagagaagaaatcagtatctgctcggcctcttcaacatgatcgtcgtttatggtatcttcaagacagagagcaagagaaaatctgttcccgaatctttcatttatcagagaatcagtgatggatattttgttggcaggacaatagagtaatggacctacactgtaatataaaacattatttttcataacactccttctgacatatctacaaaaattcccgtaaatagggtaccttatagaaattcaataaaatactgcaggtaatccggtccatcacagtgtgaaggaccgagtcagcagctacatcatagcacatttcaggggaataagccatagaaagaacaggggaattttcttgaaatataaatagcaatatgatacaattttgaggtagaatttatacgaaaatttggagaaaattatggttccgcattattttatgaaattgctgtagaacttatcatgaacagaaataagataagcagatattgaaggtgagatacttatatgttggaacacaaaaaaattcaaaacctcagtgattattttgtcgaactgaacagcaggcgggagaaaggtgtttatttctaccgtatcaacggatattctgaagaagtcggcgaatttataaagaaatattatgatacagcaagaagaaccggagtggttatcgaagggaagatacctaatcccgatgaggggaatcttgcatattataatgaaataatgggaatggattttcagatgagtatggattttatccatgtcagtctgagaaaatggctgccaaggatgaatgagtttcagagacagaatgtggcagcctccatttatgactctctggattccctgcgaaaagccgggaaaaccgagaatatgctcaggaacgcatatatcaagttcatgtgctggctgtattataaatttgaacgcattgtaaatcagcttggagagaaccatatccctaaaatattatatgaagggcagataagcaattatgagttaatgctcatatcgattctttccaatgcaggctgtgatgtagtactgcttcagtatgcaggggatcagggatacctgaaaacagatccgggttccgttctctcagacagtttgcagatggaaggtttgcagccatttccgcagggatattgtgtgaaaaaggtcagagatgagattcagaatgaactcaacaatgagagactgtatggaatcagaccttcgcttacaaattgtacaaatgcatggataaagggaaacggcctggatgatatccgcgagagcattctgttaaggggaaatgacagccgttttttttataactgtttctgcaggataaacggggcagaagataagcttacttatgcaaatgaactgttcagattgcagcaggaactgagaaattcaaagagaaatacagtgatcgtaagtaaagagattccaagaccaacgccgcaggaaatttcagagataaagaggtcaaactatacatccggagatcagatgctcctgggacttgcgtgtaatatacagtatggagccaatctggagcttcagcggatcctgcataaaacatttgtggatgttatgctggctgaatctcagaaggaaggggaaaatcttaacagactgacaaacagggcagtgtatctgctgtgctggctgagaagatatctgccgaagctgttcataaactggaaatcaccggagattggatgctttatttatctggggggctgccggaatgaaaacgaagctctgtttatgagtttccttggacggctgccactggatgtgctgatcttatgtcctgatctaaacattaagtgctgtctggaagataaacttctgtatgaggtcaactatccggagagtctggcgatcacagaatatccggaagagagttctcagataaagattggaacagccgcttatcatgcggaaagagaacttgatactctgatgtatcaggacagtgggatatacagaaatcagcagtatgtgaaggcgaatgttatcaatctgcagaccatgtatgaagagataaaactactgtgggatcaggaattgaaatacagacctaatttcagcacagttaacggtgtggtaaatattccggttattttttcaaaaatctcaggagtgaaggatggaagtgtttctcagtactgggaatccatagcagcactgatcacagaggatactgttgttgtgaaaagtgctccgtacattgaaccaactgcctccggtccaatgaaagcctttgccgtagaattttataaaaacggaaagcttctgcggaataaaataaagaatcatcccagatatccttatcatcttcttcgggaggaaatgcaggaatttatacttgacaagctgcagcttctgatcgagcggaaactgataaagggtattggggaaaatggtacagaatatacagtgatcgcgcagattctggatctgccgaaggagattctgcgtctgatccagaaatttgattttacaaaaaagaatccgaaactgatatatattaatacaggggagacgatgatttcacttcaggattcgattcttgtaacattcctgaacctggcaggatttgacattctgttttttgtccctacaggctatcagagtgtggagaactactttgcagaaaaactgatggaagagcaccagatcggggaatataaatacgatatgcaggttccggatctgaataacatttcgacaaacagtacccgcccctcatggcggagaaaacttttcaggagaggttagtagattatgggacttgatttcggtaaatcatctatgggaaatcctgctcaggccggtaatggtcttcaggagaaaaatgagattgaagttgtggagaaatatgatattgtcgctgacaggcagcagatgaatgctgagctggtcaattcaaaagaagtggacgatattgtcagcacgatcgaagtttacaatatggataccattgtatcttttggtgcgaaagcagcagaggagatttccaaggcatctgatgtggtcctcaacagcatgaatatgtcgcagcttaatgagacaagcgagatgcttaaatcgctggcaaagatcatggatcagtttgacattaatgaaattaaggataatccgggacttttcggaaagcttttcggaaatttcagaaaacagctggataagatactggccaagtatcacacaatgggcgaagaagttgataagatttatgttcagcttaaaggatatgagtctgaaatcaaacagtccaacaaaaagctggataccatgtttaagaccaatgtggattattatcatgaactggtgaaatatatccttgcaggagaacaggcatgtaaagagattgaagcctacattgcccagagacagcaggatatggaaaatacgggagatcagtctattcagtttgaacttaccagtctgaatcaggcactgatgatgctggaacagaggacacaggatctgagaacagcagagaatgtggcaatgcagtccattcccatgataaagactatggagttcagcaattacaatctggtgagaaagatcaattctgcgtttatcgttacgcttcctgtatttaagcaggcacttgcgcaggcaattcttctgaaaaggcagaagatacaggcagaatctattgcagaactggataagaaaaccaatgagatgcttcttaagaatgcccagaatacagtagatgtatcgaagatgacagctaaaatggcatccggaagttccattcagattgagactcttgagaagacatgggcaaccattacaaatggaatcgaagagacaagaagaatccaggaagatgccagaaagaaacgccaggaggatcaggttcgtctggaggcaatcaaacaggattttaacaaacaatacaatgtgccaccggtaagaaaataaaaacacagaaaaaagggaggatgaatgatatgcctattaatttatcaaaaggacagaaggtagatttaacaaagaagaatccgggacttaagaagatcatggtaggacttggatgggatgtaaacgcttttgattcaggttcggattttgacctggatgcagcagcatttatgcttggtgccaacggaaaatgccctacagagaaagaattcattttctatggcaatctgaagcatgccagtgaatcagtcatccacatgggagataaccttaccggtgagggtgaaggtgatgatgagcagatcatgatcgatctgtcaaaggttccggcgaatattgagagaattgcgtttacagttaccatttatgatgcagaagcaagacgtcagaacttcggacaggtttcaaactcttacatccgtctggtagatgaatccaatgaggtggaactgatccattatgatcttggggaggacttctccattgaaacagcagtagttgtaggagaactttacagacataacggagagtggaagtttaatgccatcggaagcggattccaaggtggacttgcagcgctctgcggtcattatggtattgaagtagcgtaatgtaagagacagtcggctgtttggtaaaaatactaaacagttatcaggtatggagctgtatagcgaagcggataagacaacatgggaggaaaaatatatgccagttagtttaaaaaaaggacagaaggtcagtcttacaaaaggtaacccgggacttaagaatgtagttgtaggtatcggatgggatatcaatgcttttgacacaggcggagatttcgatctggatgcagcagcgttctgtctgacagattccggaagggtttctgattcgaacgattttgtattctatggaaatcttgtacatccgtccggagcagtccagcatatgggagacaaccttacaggtgccggagacggagatgatgagcagattaagatcaatctgtcaaagattcctgccaatatcacaaagattgcatttacagttaccatctatgatgcagaggcaagacgccagaatttcggacaggtttctaatgcctttgtgagaatcttcaatgaagtgacaggagaagaaatcctcagatatgatcttggagaagatttctctattgaaacagcagttgtatttggtgaactgtacaagaatggtgacgaatggaaatttaatgccattggaagcggttatcagggtggtctggctgctttgtgcaacagttatggtgtagacgtagaatagtgccggagggcaacaggagggacgaaaatgtcagtaagcttacagaaaggacagaaggtaaatctgtcaaaggagcatgcaggattagcaaaggtgatcgtgggacttggctgggatgaggcgaagccatccggcggtggtggattgtttggtgcattatttggttcttcatcacatcaggcaatcgactgcgacgcttctgcaatcatgttgaaaaatggtaaatttacagataaaacagacctggtatatttcggcaacctgaaacataaatccgggacagtcaatcatatgggagacaatcttacaggagcaggcgagggagatgatgagcagatcgttattgatctgtcaagagttccggctgaatatgataagattgtcattgttgtcaatatctatcaggcagtaaagagaaaacagcattttggaatgatccagaatgcatttatccgtctggttgatgccagaaacaataaagaaatgtgcaaatataatttaactgagaattattcaggtatgactgcgatgatttttggggaaatatacaggtataacggtgaatggaaattcaacgccgtaggaaatggcacaacagatcccggacttggggaactctgccagagatttgtgtgaaaataaaaagaggagctgttatggttcctctttttatataaaatccggtaactgtctgtacatgattgaacagttgcaaaacccgaaagaggaggttaattattatgaatgaaataaacaaagaggagcgaatgcagggcctgtccggacagcaggtcagcgagagcaaggcgaagtacggcaccaatgagctggcgaagaaagagactgaatcactctggtccatgttcatcggcgcatttgatgatatctggatcaaggtattatgtgcggctctggctcttaaagttatcctggctgtgctgggaatctttgtccctgcattgtccggcggaaatgatgttgtggagatcatcagtattgtgatcgcaatcgcacttgctaccggtttcagtaccctgtcagagtacagaaatacctcaagaagtgaggcgcttcaggaagaatacagcaagacctatgccaaagttgtaagagatggaaagctggtcaatattcttaccagtgaaatcgttaaaggtgatacgatccttatccaggcaggagataaggttccggcagatggtctgttatttgaaggtaagatcaaagtatctcaggcggcattaaacggtgaatcaagagatgagaataaagcagcagtcaccaatatggacgaggcagaatctacggattactcctcacagggaaaagtctttatgggttctgttgtgacttcaggcgaaggttacatgatcgcaactgttatcggagacagttctgaattaggaaagataaacaaagctctgacagatacctccgaggaagaagagcgaaaagatacttccagcctgaagctggagggtgtggcagcaggtatcggtaaactgggtgtgtcagctgcagcgatcgcaggtatccttcatgttgtcctgactctaatcagggcagatcaggcaatcactgttgtttccgttctccttgtaatagcggaagcagttatgcttatggcttctatcgtgatcatggcagttccggagggactcccgatgatgaacagtctggttcagtcaatgaatacagagtccatgtataaaaagaatatccttgtcagccacaaggcggcattttcagattctgcttacatgaatgtgctgttcagtgataaaaccggaacgatcacacagggtaacctgtcactggtagaatttatcacaggtaacggtgagattgttgattccattcagagcagtgagtttatagaagctatcaccctgaataaccttgcaaagatttcctcagagggaaaggcaatcggaagtaacaacatggacagagcactgctctcttatgccattgatcatggttataatgattctgacaatgatccggagaaggtagaagagatcagcggatttgattccgagaagaaatgtgccactgtaaaactgaaaaacggacttgtttactggaagggtgctacagagaatatcattgataaagtaacacattacatgcttccggacggggaagaaagagagtttacaaaggcagataaagataaagtagaagagcagatgcatgcacaggcaaagagaactatgaagcttctctccgtagcgaaaatcagcgctggaaagactgttcttatggcagttctgtgtctgcgtgataatgtcagaacagatgcggttgagactgttcagattctcaatgatgcaggaatccaggtagttatggttaccggtgatgcagaggaaactgcagtagccattgcaaaagaggcaggtattcttgcagatgagaagaaggatgtggttcttacccatgaagaaatggagaaattatcagatgaagagctgaagaaagttctcccgaacctgagagtggtaagccgcgcgaaaccgcttgataagaaaagactggtatctctttcacagcagattgataatgtctgtggtatgaccggtgacggtgtgaacgatgctcccgcattaaaacaggcagacattggttttgcaatgggagatggtacagcagttgcacaggaggcaggagatgttgttatccttaataacagtctgacttccattaaagactgtgtgcttaacagcaggactatggcgaaatctgttggaaaattcctcattttccagcttactgtaaatatcagtactctgttaatgaatatcattgcaccgatcctgggatggacagagccgttttccattgtccagatcctttggatcaacctgatcatggatacactggctgccatggcgtttggtggagaacctattcttgacagatatatgaaagatcagccggcaaagagaacagataatattctgactccgtacatcaagtcagcgatcggagtaagtgcaatatttattacccttggttctatcctgatacttgagaatatcggcggcattaccagttgggtaatccctgcgggctgtgcagatccggagctttatgagaaaacatttatgtttgcgttcttcatttatgcgattatctttaacagtctgaataccagatctgagaagtttaatctgtttgagcatatcggggagaataagaacttcgtactggtaatgggagcaatctttgttcttcagaccattatcattgaaatcggcggaaaagtatttaacacaactctgcttgagccaaaggcattactggtatccatggtacttgcagtacttattataccggtggatcttatcagaaaagcaatcatgagcaggtaaacaatacgtatgaaataataattatggggctgtcgcaggtaataacagtgtggcagtcccatttttggaggaagcgaatgaatggcattttatgcgcggacatggacaataccataatatattcgtataagcgcaatatcggtgaaaataaattaaatgttgagttatataatggaagagaaatctcgtttatttctgaaaaaacgcatgatctgttgaaaaaagtaagtgagaagatgactatcataccaacatccacaaggacggaagaacagtataaacgtattgatctggatataggaatcgtaccctatgcccttgtctgtaatggaggagtactgctggtaaatggtaagcgtgacagagagtggtatctggagtcgctgcaaataatccggaatagcagaccggaaatggaaaaagcgcagcagattcttgccggggattccagacgaaagtttgagctgagatttctagatgagctttttatttttacaaaatgtgaaaagccagaggaagtggttgaagatctgcaggcaaaactggctacgaagctggtagacgtatttcataatggagagaaggtatatgttgttcctgtaaatctgagtaagggaatggctgtgagaagacttcgaaagaggttgcagcctgcatatatcatagcagccggggacagcgaattcgatgtttccatggtggaagaaagcgacctgggattagttccggccggatttaaaaagatttacggcaatggtagcggcagattcaaagagacagtgatggaaatggaggcaggaagattgttttcggaaacattacttgagaaatgtttggttttatattttaaagagccggactgactgcaattctataaaatattgcagtcagtccggctctttgttatatcaggctgttaatccatactgatgcggattccgctctgacgttcagatggctgaatgataaccgtaacattatctcctccatgccattcaaactgataagactctccggaagtctggccgatgaaagttttccagtaattcgtttatttcatgtatttttccagaactggaaactgtacaggtccgatgtccagaatccggcggtgaaattctttcaggtcgaaatcatctccaagtcttttctgacagactgttttcaagtcaaggaaattcagatatccccaatagtatttcagatagttaccgggagtttccacaatatactgatagatttcggcagcagtagaagcattgttgatgccaaatgctttcagaaagacagcagtgcgggctgcatcccagcccctgtaatgaatgccgatatcgatcagggagtaaatgcacagattcatactcctgtttaaccaggcaagccggacggcattttgggcagaatccggattcttcatgagggaggcggcatattcatagccgtaggattccacgtaggttgcccagccttccacgtaaccggaggaggtgaccagatatctgatgtcagagggattgttttcggcaaaagaaactgtctggtaaaggtgaccgggaaatccttcatgtgccagtgtgccgaaaagctccagagaagaggtacgtccggaatcgttgatatagattacgttggggtttcgggtatccacaggcggcgtgaggtaaaaagcaggacttaaaaattttttcatggaaggatgaacggtgcggagttcgtaagtggcatctttcagttctgggaaatcttttttcatcaattccggaagcttctccagcatctgagtcggtgtcagcgtaagttcaccggaacattgattcagcctgtcgatcagggaggaattctgttccagcagggaagatatctcccgatagtcggacaaaagctgagctgacagccttttttcaatttgtccgacaggtacataggttcctgtctggctttgcagcaggtagaggtaatattcacgcccaccctcaaaaaatgccaggccccggctacttttgcctgtaccgcgaagactttccagactgtctgccagttcctgataagcagggatcacttcggttaagatcagtttatgatgatatgtacagagttttttctgatcttcgctgctaaatgcagggttggagaaagctttcagtttctgcgcgaaaatatcatccatgtagttggaatcaggattcgcgacaaaagaatgacattgtttcaggatacggtccagagttgtgtcactcatgaaaagccctgactgggatttctgcttttccagttttataatactttgaaaatatggcctgacggtactcagaagtttcagataatcagagatatcttcttttgtccggaaagtatattccgccagaagaatgggaagttgtgcctgcacacccaggcctggtcccagcggctcatccagggcgctgttttttccaagggaggctctggtgtgaaaatagagaagaagcatatcacaggtaagccggttttcttcggagagcctggaataggcaaaggatttcagctctttctcatattcctgacagagactggtggtcttagccgggtcagaaagtgcagttccaagagttgcctcgggctttctgataccttttttttcagggtgtgcaagagtgtagtgaagggtgagggtattgctgcatacttcggaccggaataatttttccgtaaaggtctgaaaacgggagttttcagaaacaaagtggtcggagagaacacccatgctgatgccaatggcaaagaccagacacaggctgaggattcttttagggatatttttataaatacgcatatccacctcggaatctgctttttactatcttattgaaggaaggcatgaagtatgctttcggtaacatcattactgttcacacaccattatcccgcgaggtgttttggcataaatatgccaaaatccagagatatacaagccaaaattcattccaaatgcgcgtcacactttttttatttgacaaaattgggatgttatgttaacatacacaaatgtgtaacaaaacgtaataaaaatgtaataattttacagcgatgtataacaggagttgattagtaaaatgaataataagataaagacaattttgatggcagcaattatgagctctgtggttctgacacagggggtatgtgtaagcgcagcacagtttgatgatggcgcatcagcgttttctgatggaacaggaagtgtaagtgctctggcaagtacactggcgaagcagacagaggaacagacacaggagtttgttgcgaaagaagaggaagcagctcagattcgtgaagaacgaagagtagagaaagcggaaaaggcttctgagaaggcagagcaggaaaaaacagccgtgctggagagtattcagcagacagttgaggatacaaagaaaaaaattgccgaagaagcagaagcgaaacgtctggcaaagagacaggaagtggtaaactttgcgctgcagtttgaaggaaatccttatgtttatggcggaacaagtcttacaaacggtgcagactgctcaggatttgtaatgtctgtatttgccaatttcggttacagtcttccacgtgtggctgcagcgcagtgtgaggcctccacaaagaaagatatcagccagcttgagccgggagatctggtattctacggaagcggatatattgatcatgtggcactttatatcggagatggaaagattatccatgccagcaatgctgctacaggaatcaagatttccgattacgattatgagcagccggcagctgtaggtacgttcatggaatagctgtaacgcctgaaattatatgattcgacaaattgcacaaagaatgtcgagaggtgggaaaagtggataaagtcatacacactctatccacatacccggttattgaaaaatcccgtaaattaaagttatacacaaagttatccacattatccacattttatgtgtgtggaatactcgatttacataaggaaaaaagaaacagatgttttgtgtaaaatgataaatcgacatttttggacgaaaaaatccacaaatctattgacttttttatattctaaaaaacatataatattgtacaaaaaagacaaaatataacaatatatatataaataatcagaatattcaaaaagatattctactaaaaaatacaacaacaatgaaaaaaagaatacatttgacagaaacgggaaatttccacataggagagacagatgtggatgagaaatgcacaaaatgaattcgggtggggataacttttcacagatattatccacatagcatgaagtcctgtgtcagatatctttgccgtgcgtcagcacgcctgcagatatcttccttgtctttcgcactctgctgaactgtcttaaatgtattatttacgaggattgctatagatatctttatcatacgtcagataaaatcagccggatgaatagtaaatattcatccggctgatttctgatatatactatttttgtttcatccgtttgatgactttcagacgagtaaattcctcacgttctttctcctccagtgcattctggatatctttggtcagtgcctcgtacttcggaatagtgatattcttcagagcattggcacgtttctgagttttcttgatattggctgcaaggcggatggctgcattttccaccatggacaggcggatggacagctcttttaccttttcaaaggcagccttggcttcgtccagagacatctttgtgctgtagtaggcataggtgggagtgttagtggttttgtcatattccaccagaggaatttccgtacccataacacttcgggttttaatgcgtatagagttctcgacaggaaccgtacacgcgatctgctggacaaaggcgataccaatctccatatttgctttctgcaatgctgtataggcagtgcggaaagtcacatcaatctgtgtctggatatcctttgcctgatcgatcagctccatcatttcacgaatcaggatgttacgctttttgtccatcagttcatagccctgacgggaaagcttcagtgagttctttgcaagtatcaggtttcccttggtgggaaaggtattcggatccatgtaatcacctcgcttcttttagcgtactgtttcgtgatagtacttgtcgaggatcttcgtatcaattcggtcgagctcttctttcggaagaagtcccagaagctcccagcccttatccagggtttcggtgatgcttcggttctcggtttcggactggccgacaaattcactctcaaaggctttaccaaataccagatagcgtttatccagcggggaaagctcatcctcaccgataacggaagcaagggctctggcatctccaacctttgcatagcaggagaaaagctgatttgccacatcctgatggtctgctcttgtatagccttcaccgataccgtccttcatcagacgggaaagagatggcagtacgttaataggcggatagattgcctgtccatgaagctgtctgtccagaacgatctgaccttcggtgatataaccggtaaggtcagggatcgggtgagtgatatcatcgtttggcatggtcaggatcgggatctgggttacggaacccggtttgccttttacgatacctgcacgttcgtacagggttgcaagctcgctgtacagataacccggataacctttacgggacggaatttcacctttggaggaggaaacctctcgcatggcctcgcagaaggatgtgatgtctgtcaggatgaccaggatgtgcattcctttttcaaaagcaagatactctgcggcagtgagggcgatcttcggtgtaagaagacgttcaacaaccggatcatttgcaagattcaggaacataactacatggtctgcagcaccgctttcctcgaaggtacggcggaaaaattccgctacgtcatatttgacacccattgccgcgaaaacaatggcaaaatcttcatcagagtcctctcccagagaagcctgctgtacgatctgtgcagccagcttgtcgtgtggaagaccatttccggaaaagatcggaagcttctgtcctcgaatcagggtggtcagtccgtcgattgcggaaataccggtgttgatatagtttcggggatattcacgtgctaccgggttcagcggcagaccattgatgtttaattttacatccggggtgatgtcccccagaccgtcgatgggctgtccgataccgttaaaggttcgtccgaggatttccggggaaagcccgatttccatgggacgtccggtcagccgggtatgggtgttgcctaaggacataccgtctgttccttcaaaaacttggataacagccttgtcctcataaatctcaataatacggccgatcttgcgagtcccgtcatccatgtgaaattctacgatttcctcataggaggcattcttgacgccttccaggaccaccagaggtccgtttatttcgcttaagcctaaatattcaattgccataaacttctcctctctgttacgactcataaccggttatggctatgaatgtaactgttccggcatcagccgtttttttccattatattatcatagaaagtatcaatgtcctgcttgtattggtcgaatttatcaagctgattatttgccacatcatatttaatggaaataattttttcaaaaatgttgttcccctctttcagtacggaaaccggcattccacggttgatgagtgcacggcatttttcataaagatagaggatcgtttccatcattttaaactgtttttccattggtacgcaggtgtcttctgcgtgaaaagcgttctgctggaggaagcccagacggatgactctggcaatttccagcgtcagtttctggtcatccggaagaacgtcgcttccgatcagcttgacaatctccatcagggagctctcctgattcaggattgccatgagctgatttctgtctgctacaaatttcggggaaacatgctctctgtaccatggagtcaggtcttccagatattcactgtagctggtgagccagtggattgccgggaagtgacgggcataggcaagggatttgtccagtccccagaaacagcggacgaagcgcttggtattctgtgtgacaggctctgagaaatcaccaccttgtggagaaactgctccgataatggagacagagccttcggttccgtttaagttctgcatcattcctgcacgttcatagaatgcggacagcttggatgccagatatgcagggaaaccttcctctgcaggcatttcctccagacggccggacagttctcgaagagcttctgcccaacgggaagtggagtctgccatgatagctacgtcgtaacccatgtcccggtaatattccgcaagagttacacctgtataaatagaagcttcacgcgccgcaaccggcatgttagaagtattggcaatcaatgtggttctgtccatcatcaggtttccggatttcgggtcgatcagtttactgaaatcttccagaacctgagtcatctcgtttccacgttctccgcatccaatgtagatgataatgtctgcgtcagaccattttgcaatctgatgctgagtcatggtcttacctgtaccgaaacctcccggaacagcggctgtaccgccctttgcgatagggaaaagagtgtccaggatacgctggcctgtgacaagcgggacgcttgcagggaaacgtttgtgggttggtctcgggatacggatcggccatttctgtgcaagtgccaaatctttggtggttccgtctgcgaactgaatggttacgatcggttccagaatggtgtatgctccgtcagatgccgcgtgaataactgtggcttctgtaagattcggaggaaccatggatttatggagaatggagtctgtttcctgagtttctgcgataacagagccgggacctacaacatctccttcttttactgtgatgtgagtgttccatctcttttctgtgtcaagggaatcaacgctgacacctcgtgaaatatatttgcctgaggctttggcaatctcttccagaggacgctggataccatcaaaaatattgtggatgattccaggtcccaaaagtacagaaatggcatctccggttcctgtaactgtatcgcctggtttcagtcctgtagtctcctcgaaaacctgtacggtggtcatgcctttcttcaggccgatgatctcacctaccagatgttccggacctacataaaccatctcggaaatcttaaatccgctgtcgcccttcagataaatgacggggccgttgacaccgtagataatacctgtattactcatgttctggtcctccgtcaaacttgaattctttgtatgctgcctcaaaatttcctgcaaaagagtgatcgatcaggatgtttttctgaggaatcgtagcgcggataccgccaagaaaagagtcctttgcaagctggatagcagtacctgttgtctgctgaagtttctctgcaagagagctgtcctctggagatagatagatagtgatctcatcatttcctgcgaaatccagagcttctttgatcttagcagttaaatagttctcatactccggagttttggtaaaagattccagaagtccttttacttcggagaaaattttctcttttaattcgttctgttttctggtccagtcacgcttgatggtgagctgttctgcggagagtgccttgtttatttcacgtcgggcgctggcagtttccgctttgatctgtgtctgggcgttttcttcactgagagttttgtgttcttctgccattttctccagagccgctttatgctcatcgagaatggcggcagctttttcgtgggcttcctctacagtgatatcataaaaatggctgagtttttcatcaattgtcatgttaacacctgcctgtaatatttagattgtaactgttcactccgttcacagtaacgtagccaaaattcattccagattgcctgcggcaatgggattttggcttgtatgtctcgagatagtggtgtgtgaacagtaacattagatttactattggtaattgttttacagttttaaaccaatagcttcattcacatatgaagtgataaaatccggtttgcggccagtaccgtgcctgtcgggaatttcaatgatcagaggggttttgtgatgaagctttacatcatctataatttcgggaaactcccggccgaatttctcggtcaggagtatgattccgatttctttattggagatagctgtctgcaaagcatcttttaattcatcatgtgtgtgtacgaccacgccctccacacctgccagtctcatccctgtgtaggtatcgatattgtcgctgatcaaaaacatctgcatcttataactgtcccaggatcatgaaggagatgatcagtccataaagggcaacaccttctgcaagacctacgaaaataagggatttaccaaggatactctgatcctcgctgatagcgcctaaggctgcgcttgccgcactggcaacggcaataccaccaccgatacaggaaagacctgttacaagagctgctgcgatataacccatacctgttgcaagtgtgccttcagagcctgcagcggcctgtacggaagaagcacctgtgaacataactgcaatggcgataagcatggttccaaagaagaagaatgcgtttacaccgagagctgttttgtaacgtccgcggtttttttcaccgatgagatagtagccaaatggaagaatgatgctgagtaccagtgcgattgctaaaatgatctgtgcgattgttgtcataattaaatctcctcttagttcttgattttgctgttcatatatatcatatttattcggctttgaatatctggctgaccgacagatatgggtttcccgaggatgatatataaatgaaaatagtataatttctgatgatctttctgtctattttacagagcggaacggctcaaatttacgtcctgtacctttgtagaagcggctgaacatttcataatattccagacgaagcacctggataccgacgatcaggccctccataccacatacaaaaaggtttcccagaactactactatccagttcaggtttccgctttctgcgcctgcaagcatgagaacgacttccatcatcgctgcatggctgactgcgaaagctccgatacggacgaaagaaagggtattggagaagtagcttaacaggacttcaaacatttcaaaaagtccctgtacaacgaacattcccttctcttttggcataacttctgatttcttctcaatgagggctgtaagtggctctttcaggaagatcaggatcaatggtacgccgaacatgataaacagtacgattccgccgggaagtgttttgccattcagtataagtgcaatggagacaactgcagagccgtagaataccagaccagctactgagtttgtatcaaaccagatgtgttctacatctccggctttccaggcattcaggatgttaaataccatacataaaaggatcaggcacataccaaaaccaatggcaacaataaatactgtattcagctttccgataaacggaactgacatcatattgttcatcgggcgaagccacagggcaggtatcacatcttcgaatccgaagatacttccgaacataaatccgaagattgtggagaacacacctgcacaactgataatgcctgccagtgtgatatgtttgaatttataaagcaggaaaccaccgataaagagcagcaatccctgccccacatcaccgaacattgcaccgaaaataaaggaataagtcagtgccacaaaccatgttggatccatctcgttataggccggaagaccatacatcttaatgtacatttcaaatggtttaaacagtttcgggttcttcagtttggtaggtggctgctggtggatgcctggcttcagatgttcgtcctcttcaccgtcaataatgcagaaaatgcggctgtcgtctttgatatcattctggaaagaatgggcatctttctctgtcatccatccacataagatatagaaaacgtccttatccccatgtgtacatgctgcaagtctgcgcacatcaaagttaccggaaagctgtgcgatagcattgcgtgatgcaacgatatatttctgatttctaagaagaaaatctgcttttttctgatcggcagatgccagatcagcagcagctctgttgcgtgtttcagtcagttgttcgaaagcttcttttgctgttccctcataagtatccggcatataaatacgctcgaagtgcatggaagaatagacggcttttactttctgggcttcgtgctccgggacaaaatacagaccccagacatactggtcatcttcatcacatttaatgaaaattgtgtccagattttcgtaaatatacttttcaaatttctggtaatattccttctcaatccttccgaaacggaagtggatgaactggaatttcaggattgaggaaatattgtaattaatatttctgaacgggcggatcactcgcagagattcatccagagctgcaagctgactctccagatcagcacgtttattgcttagttcccgataatcagactgaatccggcggattgtatttaaagcctgttcagtatccataggtttggcagaaatcttctccggatctgccagttcatcatagaaactgttggcagtagagagtgcttccttatatggattgatttccataaacggagaaagactctctactgcggtcagctcggaaagggcattttccagatgaatttcgtacttggaaagataggtgtttaccactctgtcaatatcggccttaggaccggtaatgctcaggaacttcattttctcaatcataaattcacctcctggttaatgttctttaaactgcgaagcagttattcagttatgcgtcatatagaaatcaactgttgcaaatataacgcatggcttcatcatgctgcacaccgtaacgtacgcattcaatggcgatagtcaggcggtttacttcgtgttccttgttatacagataagaatagatcactgctacagaatatggatttctgtgggattccttctcaaggatcgagcggtggatgtggttgtagaattcttccagattggctgcggtaagctgttcatatttgttgccgtaccatgttttctggaaaattcttcgaccttcttcgtatgaaggtgcttccaccaaagctgtgatctcttctttctttaacttataatttacagggatcagcagggcataaatacttgccggatccatgttgtaataccttttggaacgctggataaactgcaggttcagcatatcaaatttctcgccgtaagtgcaggtaatctcttccagatctttacctttaaacagcttcttacggatgttccagatctgggtaaaatagtacagatccagtgccataccatagtcgaagagaagtgctgtttcatgctcctggatcttcgaaagcgggatgtaaaattcgtttcctttgaggcaggagatcagttcctccatggtggaacaggtagtgatccggtctacatcaatattggaatgcagacggaaaaattcacggtacggagaaacatctacaggatccgtgtcgcggtgatcgaagatatttgtcatgacttccttcagtacacggatttcatatcgcttggaatacagatccagaaatttacgctgttccgggttggcaaagtgataaattctggagaaattctggaatatggatttcttcagaagcttctcaatctggccacggtgcagggtattttcatccagtgcatcccacctggaagagtattccggcattcgcttcagataggcggctacctgcgtgacatcggagagttggaggatttcctcgaactgatccatggtagtaagcctgctctgcattgcgcggattttcgtggaaagtccgctgtaggagagtacgcctcccattgtttttcacttcctttcctgatgtcatctagtacatcgttttcgaaataactataccactcacttgtctgcaaatccgagtgcacaggtctaaaagcctcagcgtagcccgctacgcctgcgtttttagacctgcacactcgaatccgcatcctacgcgattggtatagttatttacgaaacgatgtactagagtgtgtctgaaaaatcattcccgcaaattgtgacgcacatcttgcagaaagcctttttcagacacgctctagcgtttgagacagatctttacatagccagtattttctcaaacaattctctggaaagttgtgagtgctgctgttcgtaatgagcatccagtgaagaaaaggtagcgtctgtatctgcacgtaactgtgccaggcgggaatctttttcttcttccagttgctgacggatccgtcgaatctgctctgctgtccgggtctccagctgctcgtcataatttttacatttctgttctgcctcttcagaaagctgttgcttttgccggtcgcagtcttccatgatgcgttgggctgtaagctcgatttcagataatttgttaagtatctgctccatcttcaacctccttggttgtcaaaattttacaaaaaaaccagatttactatgtgaaaaatagtaatatctgttagatatcatacacccttttgttaaaaaaaaccatctaaattttttccagaaagaaaaaaattgttattttttagacaagttaaagaaatctcctgcgaatatctgtccgggatgtaattgacgttaggagtatggtatggtagtttattggtggcaggaaattgcacgcacatcttgcgtaaagcatttttcaaacacgctctggagatataagaaaaggaacaggagatttttatgagattaagaaatattccgggagctcaggatgcaattctggagagcccttatgtggtgcaggaaccacagacaaagaaaggacactggggggaggtttttgtgaaaaagcagcctcttcatattgaagtagggatgggaaaaggaagatttcttatggatctggcccggctgcatccggatatcaattatataggaatcgagatgtatgacagcgttcttcttcgcgcattgcagaagagagaagaactggaggagaatggagaggtttattctaatttattttttatgagagtggatgccagacttctgccggaaatctttgagaaaggtgaagtagataagatttatctgaacttttccgatccatggccaaaagcccgccatgcaaaacgtcgcctgacatccagagaattcctggcacgttacgaccagattctggttcaggatggaaaagtggaatttaagacagataataaggaactgtttgaattttccctggaagaagtggaggaagccggatggaatctggaggcttctacctttgatctgcatcataatgaagagatggtacagggaaatgttatgacagaatatgaagagaaattttcttctatgggaaatccaatctgtaagatggtgatttccagagagtatcacagataaaacagcagagcaattatctggtttatagcgattccatagtgaagtggattgcgatgatccatttgactatctgttgtggctggcagtgcatattatagtataagaaaatttcggggcgcttcgcgccccgaaggagtcagccagtgaaacgaaaaagttctttccataataaaatgctacaattccgctatgaacacaaaaactttgataataccttcagccgcctgcggaaatccgcagaagaggtcaataaaacacttaacaaaatgtcccaaaacgacgaaaaaaaggaaaaataaatgaaatagaaaaaaatctgattttttttgaaaaaacctattgacatttaaacgactattatatataatatcacttgcgttgagggtgatgtaaaacttcaacacagagaaaaacaaaagaatatgcgcttttagctcagttggtagagcacctgactcttaatcagggtgtccagggttcgaacccctgaaggcgcactaagaacactgtttttgcggacaaagcgattgccgcggggacggtgttttttatgttttacaggaaagtgaaaaataaaggtgtctgtgaaatagagagaaatgaagtattttatgctactgataccgcttaaagaacacagggtcaagctggtaaatatcttcatacttgcgatggattacgcaatacttcatcaggtttacctgattatttttgagatacatgggattgacataaatgcaattaagaagtaatataatagtaaccagaaaagaagtaaatcaaactgatgcaaagaacccccatggaggaccagtccatgggggttcttttaggctagctgtctaatgattccggtctaaccatcctaataacattgaactcccttaaaatttatagttttgcaccgtttggacatatttacattactggcaatttagaataaaacaggttgtagaaaacggcttgtaatgataaaattaaaaattaaataagttgtaagtacatggaaaagcagaggaacaaacccaccaatagaatatgttgaacacatttgcgaacttctgggagtgaacatagagtactttgtaacaggaaaaaggaaaatggcacatatacagaagcagaaaaaagattcttaaaaattatcgaacattatcagagaaaaagaaaggaatggaagaaggatatatacaaggcttaaaagatcaaaatgacgaagaagataataagaaagaaaaattatcagaatccaagattggataaataatcacaaataggggaagaaaagtatgttaagtcaaaattatataatattatttgcaattataagcgtagcaataatctggggagctgtcggaatcaaatactggtatgaaaataaacagtataaaaaatcatcttatggtaaacagagtaaaaaaagttttttgaatattcttaatgataaaggcgcaagaggagaatatagaacatcacaaaatcttgaaacgactgcatttgaaaataaattacttttcaattgctacatccctaatcgatcaggagcaaaaacagagttagatatcattatgataagtaccaaaggcatctatgtcattgaaaataaaaattattcaggctggatttttggggatgagcagagtaaaaactggtgtgaaactttaaagggtaaaaaatatttcttttataatccggttaaacaaaataaaagtcatattaaaaatctggaaagattattacaaattggtgaggaaaagtatatttcccttattacattcaacgcaaatgctaatttgaaaaaaatttcaacagaaagtgaaaatctgtatgtaattcatagcagccaattaaaagcgtttatgaaaacacagacaggaaatcctgacattctaacaagtgaagagatagaaaacatatatcaaaaacttttactaggaacacaacttagtgacgaggaaaaacaagagcacataaatagaataaaaaagcagtataaaaaataaaaggttaagataaataaaatttgtatctcatttatggcagtctgcgaatcaatggaaacacatctatcgccatcagggagatggaagatggatgccagatatggacggcagttttccgtagagaaatttgaaaaaacactctccgccacggtatatggaattcacaaatatctgggttccggtctggtcaaaggaggttgcggtatcgaatgaaaaaaatactaaaaagaacaggaaaaatattttgcctttttctgctgatcgtggtgctggtaaatatactttcacctcttttttgcaggaaaccggacgaaacatatgtggaaagtctgagaaagacagaatttacatcagagacagcaggcgtagaaaggatttgctgcattgacgataatgaagaggcacttttgtggaggcttcgtatgattggcactgcgaaggagagcattgtactgtctacctttgacttacgcgcggatgataatggcactaaaattcttgccgcattgaattgcgctgcggcaagaggtgtgaagattcagttattgatcgatggaatttatcagcaactgtttctggctggaagcagcgatttccaggctctggcatcatatgagaatgtggaagtaggagtttacaatccggtgacaccggtcaatctgtttaaggtgaattatcgcatgcatgataaatatctgatcgtggatgagaaaatgtatctgctgggcggacgcaacagcaatgatatctttctggggaatcagacaaaaggcattaatgaagacagagatatcctggtgtatgatacatcagaaggacagggagagtctctgaaccagcttgaggattatttccataaaatatggaaggaaagctgtgtgagcattaaaaaaggcaaacaatcttccagatatacggatgcataccggcacatggaagaaatttacatatctctgctgaaaaggtacaatgatatagaaacctacagtgcatgggaaaaggatacgatagaagcaaacaagatcactctgatcaataatggaattgaggcggggcgaaaaacaccgcaggttctccagacaattcagtatcttactgaaaatgcagatcatgtaataatacagactccttatgtgatctgtaatggttacatgtatgatgtattgcaggggatttcagatcatgcaaaacttcagatcgtgctgaatgcagtggaaaaaggctctaatccatggggctgtacagattatcttaatcagaaaaagaaaattctggaaacaggggcagatgtgtatgaactgatgaatgattatccggttcatacaaaagctgtgctgataaatgaccgtctgtcagtagtaggttcctataatctggatatgcgaagtacttatctggatacggaactgatgctggtaattgacagcgaaaaactgagtcagcagattcacgaaacagaatcagattatatggaaaaaagcaaagaggtacttgcaaacggtcaggaaaccgaaggcgcaaagtaccaggggaaagtgttgaatcggaaaaagaagttatactacggtgtgctcaggatgatcattcgtcctcttcggcagctgctttagagtgtgtttggaaaatcattcccaaaatctcctgcaaattgtgacgcacatcttgcgtaaagcatttttcagacacgttctagaaaatagtatcacaagtatatgtcatataaatgttcagtagctgaaaaaaagcgttgtcaatcagactacagaagattaaaatagacataaaagcagctgttacaactgttgttgatgtaaaggaggaaaagcttttatggacttaaagaaatttatgctggaaggtaatcctgtatgcagaaaggaagctgtgatcgtgggcgatcatttcaggattacaatgttgacaactgccctgattcgttttgagtacagcgaagacggaggatttgaggacagagcaacacagatggtatgcaatcgtgatttcccggtgccggaattcagggtgagcgatggcggtgaggaattacatatttacaccaaagacctggaaatccactatgacagacagaaattttctccaagcggtctgatgatacgtgtagcgggtggaaaagccagcgagcgcgtgtggcattatggtgatgaaccaaaagatctgctgggaacagccagaaccctggatgaagcagacggtgagattccgctgagtcatggaattatgtccagaaacggtttttcagtgctggatgattcccacacaatggctatgggcgaagatggaatggtagagccacgtcagggaaacagagcagacttttatttctttggatatggtcacagatatgtggaatgtctgcaggatttttacagattatgtggaaaaacacctctgcttccaagatatacgttcggaaactggtggagcagatatcacaaatacacagagacagagtacaaagaactggtagagcgttttgagaaagaagaagtgccattttctgttgcagttgtagatatggactggcatctggtagaggatgtacctcctgtatatggaagcggatggacaggatatacctggaataagaagtttttcccaaatccgcctgaatttatggactggctgcacaaacatggatataagatcacactgaacgtacatccggcagatggagtgcgtgcttatgaagaagcctatccgagagttgcagagaagatgggaattgatcctgcaagtaaggaaccggtactttttgatatgacagatccgaaattcattgagacatattttgaggaactgcatcatccgatggaagaagagggagtagacttctggtggcttgactggcagcagggaactgtaaccaaggttccgggactggatccgctctggatgctgaaccactatcactatctggacagcaagtggaaaggaaaacgtgcgctgactttctcaagatatgcaggtccaggaagccacagatacccggttggtttttccggtgatacgttcattacctgggagagtctgaaattccagccatatttcacagcaaatgccagcaacatcggttttggatggtggagtcatgatatcggtggacatatgtttggatacagagacgacgagctcactgcaaggtgggtacagcttggagtcttttcaccaatgaatcgtctgcacagcacagataacccgtttaatggaaaagaaccgtggaaatacaaccagattgtagaaacagtaatgaagaatttcctgaaactgcgtcataagctggttccgtatctttacaccatgaaccgtcgtgcaagcagagcgggactgccgctggtacagccgatgtattatctggagccggagcgtgaggaaacctatgaagtaccgaacaactattatttcggcacagagatgatggtatctccaatcacagataagctggatccggtaacaggacttgcaggcgcaaagacatggattccgcagggaatctggtatgatttctttaacggaagagcatataagggcggcagaaaagtggatctctggagagatatttatgagatgccggtacttgtgcgtgaaggcagcatcattccactgaaggacatggaaggatatgataattccattgagaatcctgagaaactggaagtacttgtatatcctggagaatcaggagaatttgtactctgggaagacggtggggacacaccggaagacctggatgagaattgggtatccaccagaatgacgaagactgcagatgagaatggaacagtatttattgtagaagctgcacagggaaatacagcagtgatcccgcagaaacgttcctggaagatccgcttctgcaacattcaggacaaaccgcaggaggttactgtaaacggacaggtatataaggatgcagagttcgcagaggataagaagcttcatggaacaatagtgatcctcaaggatgtgccggcagatgcacaggtgaaggttacttttgcggcagatgcagctgtttatcagagagattatgcagaagaggtctatgagattctggaaaaagcacagattacctatgcacagaagacagaggtttataaagtagtgaaagagctgggcacagaggcagtgcctgttctggtatccatgaatttgaatccgtcattgcttggggtactgatggagattcttacaatgggaatttaaccgaatcaagctagtgtgccaacaagttgatttctcgaacaatcttgcgtctaaatttcttatttccgcgttgtcgtcggtcgccgtagccaccgctacgcctccttcctccgccttgaaataagaaaatttatcctgcaagattgtttcaagaatcaacttgtcggcacactagttctctgcggtaacacaaaaatcccgctcacagttgtgtcttactgtgagcgggatttcacattttaaaagaaggagtgccggatcttgcgatccggcaagtatgaaaaagaaaaagttttattataaataaagcgtttgctttatttgcttattaatatacagggaaaatgtgtgcaaaatgtgatggactgttgaagaaattgtgattaaattctaaaaaacttataaaaaaagaaaaagacctgaaaaggtctgtaaaaagaaggagggccggaccttgcggcccggcataagtatgaaaaagaaaaaagttaaaaatctatgtgaaaaagcatttgcaacctgtttgtaaagcatttgctttatttgcttattaatatacagggaatttgtgagcaaaatgtgatggactgttgaaaaaaacgtgattaaattctaaaaaacttataaattagaagtaagattactgttcacacaccactatcccgcgaggtgttttggcatgaatatgccaaaatcccgagacatacaagccaaaattccattgccgcaggcaatctggaatgaattttggctacgttactgtgaacggagtgaacaataacgtaggaagaaaacacaaggtggaaaactgaaaataagcattgtaaaaatccgaactgtaatttataataaaattcaatggtaacggttcaatatctttacagttacaaataatgagaaacaaggaggaaaacatgaaaagagaaacagtcgtcgtactggatttcggcggtcagtacaatcagctggttgccagacgtgtgagagaatgtaacgtatactgcgaaatctattcatacaagaccgatcttgagaaaatcaaggcaatgaatcccaagggaatcatccttaccggtggtccgaacagctgctatgaggcagattcacctacatgcaataaagaattatttgagcttggtattcctgttctgggactttgctatggcgcacagcttatgatgcatgttctgggcggaaaagttgagaaagcagatgtgagcgaatatggaaagacagaggttctggtagataagacagattccaaaatcttcaaagacgtatctgacaaaacaatctgctggatgagccacacagattatatttcccaggttgcaccaggatttgagattgctgctcacacagcagactgtccggtagcaactgcacagaatgaggagaagaagctgtatgcgatccagttccatccggaagtgcttcatacagtagaaggaaagaagatgctttccaacttcgtacttggtgtatgcggatgtgccggagactggaaaatggatgcttttgttgagcatactatcagagaaatccgcgagaaggtcggggatggaaaagttcttcttgccctgtcaggtggtgttgactcttccgttgcagcaggacttctttccagagcaatcggcaagcagcttacctgtgtatttgtagatcatggtcttcttcgtaaagatgagggagatgaggttgagggtgtattcggaccaaacggtcagtttgacctgaactttattcgcgtcaatgcacagcagagatattatgacaagttggcaggtgttacagagcctgaagcaaaacgtaagatcatcggtgaagaatttatccgtatttttgaagaagaggcaaagaagattggtgcggtagatttcctggcacagggaactatttatccagacgttgtagagagtggtctgggcggagagtccgcagtgatcaaatctcaccacaatgtaggcggacttccggatttcgttgattttaaagaaatcattgaaccgctccgtgacctttttaaggatgaggttcgtaaagcaggtctggagcttggaattccggagagactggtattccgtcagccattcccgggaccgggacttggaatccgtattatcggtgaagttactgcagagaaggttcgtattgtacaggatgcagacttcatttatcgtgaagaggtagacaatgctgcagctgagtataagaaagaacacggtgaagatccttcatggatgccgaaccagtacttcgcagcactgacaaatatgcgaagtgtaggcgttatgggtgacttcagaacttatgattacgctgtagcgctccgcgcagtgaagactatcgacttcatgacagccgaatctgctgagattccgtatgcagtactgaataaggttatgaaccgcattattaacgaagttaagggcgttaaccgcgtattctatgacctgaccagcaagccgccgggtacgattgagtttgaataagagccacaagtcttggaatccgctaaacaagcggcttccgagactttttctttttgctctgctactaatagcaactactcttttttatcgttttcagttggttgtcattaactttaatagcaagaaaccctgatgactgctggatttcttttaaatgatttttctttgtggcatctggatgattttccctgatgcggtatttggcggtactaacgcaggtccaaactgagatcggatggttacatctgagccgttgtcctgagtctgagatacttcacaggtgatacctgcggcttcaagcaaagggttatcagatggtggctcaggtgttggcgaatctgttgcctgcaatgattccagactatgcacaagctcctgttgtttatgtggaaacagatgggagtatgtgttaagtgttgtggagaccttttcgtgtccaagcctgtctgctaacattaatgcatcacagccttgattgataagtaagctggcgtgcgaatgcctgatatcatgaattcgtatcttctttacacctgtgtttttacagcctcttatcatctcatgttaacaaatgaagaagttattgaggaaatgcttaatcttgcaaaacagattgtagtagcccaaaaggaaggtgaccagcttgggcttactgctgatgagctagccttctatgatgcattaacgaagccacaggcaataaaggatttctatgaaaatgaagaactgatagcaattacaaaagaacttgcagacactctccgaagaaacaaaacaattgactggcagaaacgagaatcagcaagagcaaaaatgcgtatgcttataaagaaactgctgaaaaagcataagtatccacctgaaggtatggaggatgcagttcagactgttatgacacagtgcgaactttggacagataataatgatatgggcgaggaaaaggttgttaacttttgagacaaatcaatatcatatgctgaatcaaactatgcagccatgatggttgctgaaagtacagcaacatatggagcaaagaaataaaaggaaggatatgcataaaaattaactttttgtgcatcatccaggaaaaaaattatggaatattatattttaaaatgttatcaagaagctaaaaataggtgttcagatgtagatcaaggatttgatagatttgaacctaaaataaaaaagatagttattgcatgtcttgttgcaatgtttacatcgtgtgctgagattatttttacaatgttattacttcctaaacaattatggtactgtattggtataataattttattaattgcaatggtaatacttataagtgtagataataaagatcaaaggaatcatatggacaaatatgtagattcacataagaaaaaaattgaggttttagacgaagtattagaaagtaaatttcaaataaataataaagaaaaaatagaagaactgatgaatatttatcaagaatatatagataaagaaactagcaaagaaaaaaagagaaatagtattatcttgaccattttttctgtatttgcaggggctttaaccatttcatttgaaaatatgggagttattggcatagattttactaattggttatacgtagctacatttttgcttgtttttgttgcaacagctggaatttggatttattcatatactttttttgatacattgaaaaggaaatatgaacttatgataaaagacttaaaagatttattgctgttaaaatattagatattacatagttattggcagtaataataggtatggtgaaaatgaagatagtaaaaaagctatatattttaataaagaaagcaggtgcgacacatgaatatgcaggagttaaaggaactcatttaccaaggcgaaaaagttgatatagagtgcaaaaaagcagaaaaaaacgtaccaaaatctgcgtatgagtcatattctgcatttgccaatacaaaaggtggatatatcatacttggagtaagagaagataaaacaaagactgatcccaaggatagatttataatacaaggaatagaggatgcacctaagcagaaagaagatttttggaatacaattaatggaaataaggtgaatataaatttattaacagatgatgatgtagggattgttgaagatggcagtataagattaattgtgattcatgtgcctagagctgattttaatatgcgtccggtatatgttggagaaaatccctataagggaacatataaaagaaatcatgaaggcgattatcatgcgacagagcatgagattagaggaatgataagagatcaaaatccagagggcaatgataatcagataattgagtattatacaatggatgatattgataaagaaacattaagaaaatatcgtcagatttttgaaatcagaaatgatggacatgtatggaatgctttgaatgacaaatcttttcttgaaaagctgggtggctataggaaagatagaaaaactggagtagaaggcttgacattagctggacttttgatgtttggtacaggacaggctatcagagaacgatttgataatgtttttatggattatcgtaatgagagtcaagtgacagcagatatccgctggaatgacagaattacttatgatggtacatgggaaaataacctgtttaatttctttacaaaagtaacacctaaattaactgaggatttaaaaaagccatttaaattggaaggtggcgttcagcgtatagatgatactccggttcacaaagcagttcgtgaaggctttgtaaatatgattattcacgcggattacttaatggatgcaggagtattgaaagtaattaagaggtctgattcgttcgaatttacaaatccgggaattttgaaacttccgttagaggatatttatcgtggaggcaattcaaagtcaagaaatcctcatatgcagactatgcttagattggttggatttggcgataatgctggctctggattcccgacaattcttgatgtgtggaagtcagaaggatggataaaaccacaattgatagaagatacaaatcttgatcaggtgacacttgtgatgaagatggaaaaggaatctgatgataaatcagcagaaaaatcagcagaaaaatcagcagatttaaaaaacagggaaggaatggcgttatcagaaagacatcagcagattttagccattatggaggctggtattgaatatagtacggaacaggtggcagaaaagataggtttaaaaggtccaaggacaagacaattattaaatgaattagtgaataaggagttattggcttgtattggaacaactaaaagaagaagatatattaagcctgtggattaaatatatccagtctcattattactaatgataacgagtatatgatagacattgttttatggcagggataatagagaagttttggaaaagaaaaaggcaagttgtatagattaaaataattcgtcgcttttttcattcgaaaagcgacgaaaagtttttattagttcgagcaaaacattactagatcagcttgtgataatgataaaataactaatattaattaaattcattcatagcatccacatatttctgtagtccattaggtttacaagctaatacagcatacagcagaggattctcctgtaccagtcggtacagatacacaatatcatcaggtgtatcgagcaagacggctgaattacatttctcacaactaataataataggtgtgtcggtatatgtatcattgatagcattaatgataatggaattagtatcaggttcatacatgctaaacaggtaacaagggttattttgtttcatggtgttctcctttccacagatacttagcaccatcaagcagattaatgatggctgtaagcatattgttatagtcggtcagtagttctttgatttcattgcttgtaggaagagtgttcaaagttgggtgctcacagcattcagcatcactgattctaaaacttatagttgagcttacatggcgatgaatactttgaccttttagatagctggctggaaaacacgctcacaatggggagcgatatgccgagaaatgagatgacgattaagaaaagcgcggtagaatctattataaactgcaagacttttgaaccgttaaaagacgatgttcattttcaaaatattataaagcggctgaaaacccttgaagaaaatggttgaaccggtttatagacggaggctaatataatgattcgcaaactgttaaaaaaacttcttggtgaaaatttcaccgaaaataatgcaaagctggaaaccgttaattttgcgattattcttttgatgtttctcctgtattgaaaaataagctgtgctgtcatacacttgtattataatacaggggtataaaggagcgagaagatgaaaaaaaggtggtttatcaatctgataatcggtataataatggttataagcggttgtcttggatatttgcaataagaagcatggggaagcggaattaaaagaattcttaatgcagcagaagagtatggacttccgaaaccgagaatttcagagagtatgaaactttttctgtaaaataatgtttataaggttcttctatgatacaataaatatcattaggagggccttttattatggcaagacaaaagaaacctgtacatcgtgtacaaatgacagaaggaaaacgaaacatcatccatcagctcctggaagagtacgatatccagtctgcagaagacattcaggatgcgctcaaggatcttttaggcggcaccattaaggaaatgatggaagctgaaatggatgatcatcttggttacgaaaaatccgaacgctcagataatgatgattatcgcaatggttataagcggaaacaggtcaacagccggtatggctcgatggaaatcgaagtgccacaggatcgcaaatcaacgtttgaaccacaggttgtgaaaaaacgtcagaaagatatttccgatattgatcagaagatcatttccatgtatgccaaaggaatgactacccggcagatttccgaaaccatcgaagatatttatggctttgaaacttctgaaagctttatttctgatgtgactgataagatcctgccacagatcgaagactggcagaaccggccactggacgaggtctatcccattctctacattgatgcaatccattattctgtaagggataatggcgtgatccgaaagcttgctgcttacgtgattctgggaatcaacacggaagggaaaaaagaagttttaaccatcagtgttggcgataacgaaagcgcaaaatactggctttccgttatgaatgaactgaaaaatcgtggtgtcaaagatgtattaatcatctgtgccgatggtttaaccggaatcaaagaagcgatcgcagcagcttttccaaagacggaataccagcgctgtattgtacaccaggtaagaaacacgttgaaatatgtcccggataaagacagaaaagccttcgctgcggatctgaaaaccatttatcaggccacagatgaaaagaaagctctggcagccttagagcgtgtaacagaaaaatggacaccgaaatatccgaattccatgaagcgctggaaggataactgggacgcaatctcgccgatctttaaattttcaacgacggtcagaacggtgatttatactacaaatgctattgaatccctgaattctacctaccggaaattgaatcgccagagaagcgtatttccaagcgatacagctctattaaaggcactgtatcttgccacatttgaagctacaaagaaatggaccagtacgatccgcaactgggcacaggtgtatggtgaactgagtattatgtacgaaggacgcctcccagagtaacgaataaacgggcgaataagacgggcggaaaaccgcctgctcttgacatgccattcaacaactgttatatataaaacaagggtgagaagcctgattttcaggcttgccacccttgcatatcatagaagaatcttatttacagactttttctcacagtctcagatttcaggaattcgataatatgtttcgggtagagctgttccgagtcaatccaataactgaccaagctactaaccaagctaaccaaccaagatattctgcaaggaaacctctatattcctcttctgtcagtaattcctccagtgcttccaaatgagctgtcactttagaagtctgttttccgccaagcagcttgcctaatatttctgtaaattcctctgtgtcacatgactcaaacatacataagatcatctccattgttgtttccaaaactaaacgatccattttcatttttgtcagctcttccattgttttcatggaagtcataagcgcatcacttgtcatatgttctgaattgattcttccttctgaatcaaccaatcctattgcaaataattctaaaaagtattttctcataaatcttgtcctcctatcgaaatggcatttcttgttcaagttcttctggtatatcaaatggaatttttctcttctctgctggttgaaatccatcagattcttctttttttgttttggcttctgcaaattccacatcatccataatgacttcggtataataggatgcagttccagtctgttcatctttgatctgagagattactaactctccggaaagagcaatcttaattcctttttcaagatatttctccacaaattctgcattatttccataagctgtgatcatcactacaaatgctttgctcgtgcgatttctttttactaccagtggaaacctggatactttggtttgtcccttttgcgtagatgccagcttagtttctggatctctggcaagtctacccattaaaacaatcgtattcttgcttcttgtcctccctttcttcctgcaacacctttccctggtatttcaaacaggataataatctgtgcattttctgcacgaaaaaatgaggaatggagtcgaaccattccccacttgctacaggatttctcctgtaatataaataagaaaatctaagtattcgcatttgggctttgtctgtacatatacatctgatcgttatcattccagataacccgactgcaaaaatacagccacagtctctgtttcagcagaggtcctatacctttcggtggtatcattattgcttcgctcttcccataggagtcttcgcctgcacgagccggattaactccggtaagcatgtttctcaagatgtatcagctccttcaattgtcaacgaatcatgaaagcttatctcagcctataatgaaaataggatactgactccactacttttttcacttctctttttgccttacaatagtcttaggcaggattaagtttgattgcaccttggaggatttgcaccccgtttgtcaacgtaaatgatttgcccttgagcacagcatattgtcgcaccttttatgaatagcacgagtagcaaagtccgtattatctcgggcaaatctcctgccaattctatagtaaaggagttgttctgtatgaaagaccttctggaaatttcctgtggactggatgtccacaaagaaaaaattgttgcatgtatcctgactggtcctctgggcaagccaacccgttctgaaatccgtgagttttctacattgattccggatatgatagcattacggaattggatcgtttctaaaaactgccatcatgtagctatggaaagcaccggtatctattggatgccgatttatgaaatactggaggatgctttctctggtgacattaccctgcttgttgtaaatgcacgccatatgaaaaatgttcctggcaaaaagaccgatatgcgggattccgaatggatttccaccttgcttcgcgccggacttttgaacggaagttttattcccgaaaaaaggattcgggaattccgcgatctaaatcgttaccgtaagagtgtcatccgcgatattacgtcacagaagaacaggattgagaaatttttacaaagttccggcttccgtctatcatcctttatttctgatatttttggcgcttcgggtagaaacatcattctgcatttagttgaacatgggcagattgataaaactgctttagattcttgtctcaaaaccaagaccagaaaccgtattgatgaaattctcatgtccgtgaacggaacactgtcagaacaccaaaaggcatttttaaggattctcatgactcattatgattctttaaagaaacatcttgctgaaattgaaacgagtctcgaggaagatatggctccatttgccctgcaggttgagcagttgaatagcatctatggaataagcacaactgcttcctgtgcaattattgctgaaatcggtattgatatgaagccgtttaaaactgcggaacacatctgctcatgggccggtttgtgcccaggtaataacgaaagtgctggaaaacgaaaaagcacctctgtcacaaaaggcaatccttacataaaaagtatgctctgcgaaattgcctgggtgattgcagggaaacgcaacacttatctttcggcatggtactggagaatcaaacagaaaaaaggagccaaaaaagcgattgtcgcacttgcccgaaaacttcttgtcatcatctacacaatgttaaaacaaggaactctatttgacgaatcctgttttgaaacaagacgtaagcactgtgaacaaaaacagctttctcgttatatacgggaattggaaaaacatggttatcatgtggaagctcaaagctagcctttcttaaatacgatcaatctctcactacaggcagccaatactgtgactgctttatagtgatgctttcataattgttgaaaacatttgttgtcaaggttcagtttttggctacgagttttattttcgtagcaaggtgcaatcggaagaactgtctgaacctcttttacgtttgtgatttttggaaatcagaggattttcaatttgccttccatatactctgtatttggagcgacaaaatcggacatgattttagaaattttttaaaattattttttgaagtgtaaaaagatataaaaaaaagatgccaggatttctcctgacaccatagtgactatgccaacttcgtgcccactgggcacaaggttgattgtattattcttcatttcctaatgatattggttctttctttgttttcttgtttttagatatcatcttatgacctgtataaatagccataatcatacaaagcaaagaacttgccgcaaaatatttatggcttgattttgaacctttatatccgctataaaaagttcctagcatcgttatcaatgctccgacagaccaatattcatgagctttcattctaacatctccttttgtgttaattttaatatgtgccttttaatgaaatatgcaaacttgaaattgtcactctacgatttcatagcctgagtctttaagaatatccagagccttttgataattttccttttttatcaaaacatagtccgtgttataggttgaaatcgcaaaaatcgaaatactgttttctgccagaatcttagcaattttagatagtattccaatcaaagaaaaatccaatatcccctgaatacgaaaacctttccagccatcatcacgttgaatgacgtttggcgggacatcactggtaatgcataccaaagatttttcctcatctgttttcccaatgaaactatattctgcatctatgtttacaagtgaataatccatcactttgcataccgaaaaatcttgatggatcttttttatttccataatgcttatcctccgaaacttcctatttttccagtcctgaaaaatagaatttagttagaatttgtaattgttgcactatttatcgttgatttttagttcaagtatatctggacgtgcataatgtccaaccacatcatgctccattttgcaggagataggcaagctcatgtcaagttctgcgtagatgatggtttctttatcccagactggttctgtcaaataatgtccatacgggtcgataatacagcttcctcctctgcaaataaattccggaagctgtgatacgacatctctctcgtataggtcagaaggatatgagttgcgtctgataatcatatcagcgttaacaaagtagcacttgccttctattgcgatgtgctgaatggtagcctgccactctgggttgtcattggtatttggcgaaatgtaaatcgtgatgcctttttgataaagagccacacgagcaagcggcatataactttcccaacagatcagactgccgatcggcccccatggcgttgttgtaacagggaagtaccccttatcagcatccccccacacaacacgttcggagcctgtcggttttaattttctgtgcaccttgtacgatccatccggctcaaaaatgacattactattataaagcgttccattaacggcatctctctcggaaaagccaaggctgatatatgctccagttttctgagccgcctctgcaagctgctgaaactccgtttctccggcaacaacagaggcatcgtaatatcgtttccagtctttacgcccctcctcacttcgtttacccatactgaaaccgaaattcatcccaactgggtatccggggatgaagagttcgggaaaaacgatgatatccggcttttgtattgcagcctcgttaatacattgaagtgccttattaagtgaggcttttttattaaacatgacaggttcttcctgtaccaatgcgattttgcaaatgctttttatgtctttcatgttaatagatttactcctcctacaaatcctgatttcatgatatcatttctaatacagattttaccgtatttttcagattcagtccatcttttaatcccaaccgatagaaaaactcttctgtatctgctccactgctgaaaattgcattacagtattccataatcacttcttcctgttctggggataacgtttccagtaattcctggtatttcttttcaatctcacttactggctctttatcctgatttaacttccattccgaatacgcttttcccatatgctctgtaattgtcagattcacaaattcctgcacttcctctggtatggtgctcgtagattcctgtttatctttctttttatcatttgatttttcaagtgtcgtatcatcaatataacgaatgatttctcgaatatttgacttcattgactgcaaatatccattgatcaactccgcgtcattccgtcaagggcatctttctctcctccttacatttcatatgtttaatacgaattgatgcaagtgtcaatctcgttttgttaatatcacccatttccctttttggctacttccctgcctcttcagataattcttttccttcaatttggttatataatacttcacactagcaagattccaatctaacgcattagccatttctttctgcgtgattgaaggttgcatacgtacaagattcagaatttctatttctttctcactcagtacattttcatcttccacttggtctaatctctctaaatctttggtttcataaaacaaaggaacaaattgaaaccagataccatggaatatttatttcataaatttcatgagcagatattatgtaacaaaaaataccaaggctaccagttacttgcctgtgatggttctgacttgaatatatttcgtgatccattaaatccacacacgtattttgctggtaaagaaggaacttttggttttaatcaactgcatcttaatgccttgtatgacctccaaagcaggcgatatgtcgatgctctgattcaggagccttatgaagaaaatgaatcctctgccatgattgaaatgattaaaaagctgactgcaaatcagaagaagggagaatgtcacaatgaaagaaggaagattaggatacaacagttataacaaaagatatggattattatcatcagatttatggattgatacgggatttcactgtggagaatgtctggaagtgttgcttgatgatgaatgggttcagaccaggatggaaatgaatcctgcaagagaatggtatcttgtaggaacaccgtattgtggcgacctggaatatatccgggcaaggataccgggataagtcagtcatacaagtaacgcaggagtgaaccgaccaacgggaggaatagcccccggcagggcgcaagggtacttttgatggacggaacggatgtcgaaagtgcttttgcgttacttttgacaaaagtaacaaaaccgccgtatccggcgaagatttccttttatgcaattgctggcaaatatacaaatttatatgccatatctggcactgattttagaaagtggggtgaggaagatgacgatgaaacgaacaatcagcggtatgatcgggacaggttctctggctcataacagacgagattttatagcagaaaatgttgatccagacagagtgcaactaaacatttgttaccggaatgagaatctgaaagaagtctataaagagctgtttgatgaagctgtagaacggtataatgtcgggaagagaaaagatcggcagattacaaattattatgaaaagattcgccaggggaaacaggaaaagctgttccatgaagtgattttccaaattggaaaccgagaagatatggctgttgaaacagaagagggagatttggctgtaacggtattgagtgagtatgtgaaagatttccagaaacgaaatccgacacttcgggtatttagttgctatctgcatcaggatgaagctactccacatctgcatattgatttcattccttatgtaactggctggaaaggaaaaggaatggacaccagggtttcactgaaacaagcattaaaaagtctgggatttcaaggtggaaataagcatgatacggagatgaatcagtggataaatcatgaaaaagaagttctggcagaaattgcaaagcaatatggaattgaatgggaacagaaaggtactcatgaagagcatttggacgtttacaatttcaaaaagaaagaacggaaaaaggaagtacaggcgctagaagaggaaaaagaatacttgacagcagagaacgaaggattggctttacaaattgtagaatccagagaagacgtacagcttttgaaggaaagtaaagaacaggcgcttagagataaaaaagcagcagaaaagcgtgcagaaacagcagaaaaacaattaaaaagcctggaagaacgcagggaacagttacagtcgattatggataatgtgagtaaggaaataaaagaatatggaacagttaaaatgttgttaccggaagctggcacgttggaacgggcagcgacctatcgggacaaaaaaatcaaaccgctgtttcttcagataaaaaataaggttggggcaatggctgcacaggttaaagaacttacaaaagaggtggaaaattggaagagcaaatatcaaaagctgaaacaaaaatataacggtattcagaaggagttggatgatatgtgtaaagaaaatcataaattatcagaagaaaagaatataatgcaaggcgtttctgataggtatgatcgtgttgtgcgtgttctgggaatagagacggtagatgcggcagtacagcaggatattcgcaacgagaaagctctggaagaaaagcagcggatggaacaaatgccgaagggaagtattcatgaaagattagcctggggaataaaaaagagtgagatggagaatcagcagcgtaagaaaaataaatcaaaaaatagagaaatggagagataaaatcatggaaaaacacatttgtgatgagaagaacggattaagctatactctgtgtggagattattatttgccggatctggtattaaatgaagaagaaccgacatatggaaaatatggaatgttacggaaacagtttttgaaagagcatagaccaatacggtatcaaaacttgttattatctggcaagctgacagcacatctgaatcagattgaccaggaagtaacagagcaggtagaagtgttaatgaaacagatggcagaaaaacagggcgtgaatgaaaacttaaagaggcaggaccagatgaggtgggttagattgatgaataatgtcaaagccagcgcggaagaaattgtgatgagagaaataatttatgtgtaagaatagatggtagagacatgagataaaaattaattagaagttaaaaaaacagaatgataattaaacaaaggctcaattgtaaacatgaactagtaacgatataattatagcgagaacaggaggtgagaacaatgcgtattggtgaacagataaaaaactatagaaaaactgtggaattaacacaagaacaggtggcaaattatctgggagtgtcaactcctgcggtaaataaatgggaaaagggaaatacatatccggatatctcattacttccagctttggcacgattattgaaaattgatatgaatgaattgttttcgtttcgtgaagaattgaccgaaaaagagattggactatttgtgaatgaactttcggaagtttcattggacagctttacaaaggctttcgagatggcatctcgtaaaatacaggagtatcctcattgcgacttattaatttataagatcgcaactgttctgaacgcatctttgactttgtcagatcttaatgacgaagaacgaatggaatataatacagctatcattgagtggctggaacgaacagcagatagtcaggacgaaagagtgagaaattcaagtgtttttatacttgcaacgaaatatgtccaaatggagaaatatgaagaagcaaatgtccttttgaaaaaaattcctgatactgtaattgatgcaacgattatgaaaacaagtgtactagcgcatcaggaaggaacagatactgctgcgttattcttggagggaaaattgctacaggcagttagcaatatccaaagctacttgtataagttaatagaaatggaagaagagacaggaaatcatgataaagcagagaaaattgctgagattacagatcaaatgatatcactgtttggactatggaattacggcaacacagtgccatatctgctgattgctggatatcgaaaaaacgtagaaaaatgtgttcaattaattaagcaattattaagcgaatcacagaagccttggaatatgacacaatcccctttgtattacaggtatgaagatactgcacagggaaaagccttttcgggaattggaaaaaattttgttcgtgaattgtattcggaaattgaaaataagaaagagtatgaattcttgagagggaataaggaactcgaatcaatttttgaggaacatttaaaataggttgtaaaaatatatagagatagaaaagctgtaaaaatctacgttgaattttacagctttttgtgtataataaaagtaacagaagcaatatgaatatggactgcatagtaggttgtgctcatgagcgagaagcgaatgcgaatgtccgctttatcaaggaaaggagctgaaaaaatatggcaaatattttaccagtgtctgatttgagaaattataatgaagttctgaagaactgtcataaaggagaaccagtatatctgacaaagaatggcagaggacgttttgtagttatggatattgaagactatgagcgcgatcgtgcagagaaaaagcttctcttgaagctgcaggaagctgaagaagcagtgaaagatggcgaaggttggttgaatctggacgaactgaaagcacttgtgggggaataagatgttaaaattgcggatcaatccgattgttgcaaaggatttgaaaaacatccgagattatattgctgaagataacgaagaatatgcagcaaagaccataaaggaaatttacggtaaatttgaaaaccttcagatgtttccgggaatgggctcagatctttcaaaaagagtcagctttcggacagattataaatatgcgatatgggaagattacgtgattatctacaagataggaaaagagtatgtagagatttatcgtgtgattaataggtatcaggatattacaaagatttttgagtaagatttataatacttaaaaagctggtgcatgaggaagcataattatggataaagtaataatttgggttaatgaaaacaaggaatggttttttagcggtattggagtaactattgtaacattgatatttgcagcaataagaaaagtattttgtaagaaaaagcaagaaaaaaagcagacaagaatagagcaagttaattatggtacaaaaagtactcaaataggaattcaaaataactattatacgaaggagaaaagcggtgagtgatgaaacaaaaataatacaaaaagcagcattgggatctgatacaacacagataggggaacaaaataattattatggtatgacagcggaagaagcgagcaatttagctataaaactgtttatggataattttcccagactgcaagaggaagcaaaaaagattgctaaagagcgagcagaggaattatgtaaagatatagtagacaaactagaaaaacaagggaaaacaaatttctctgaattttcagatccggacattcaatatattttaaataagtcgcatcaggagtatgcacgattcggaactcaaacattacgtgatttattaagcaatcttattgttaaccgaataaattatgataatgactactatatgaaaatccttttagatgaagctgtagaaattgtaaaatcactatcggaagttcatttaaattatctttcactaatatttttatgtaaacaaacaaagatgaatggtattaattctattgaatcacttaaagagcattgtgagtacatttgcgcaaaaatgccagttacaaatggaatagagagcagtatcccttttttgcatatgcttagattattaaccatttctttaggaagtgcagctgaggtgtattctaaacaatataatctggatatagataaggttaaagaaattttaccattagcaatgaatggtattcctggggattatagtttaacaccagtaggaattataattgcaattataaatatacgcaataaaacaaatttaaatttagacttcaaaatatggataaaatctatttgaaaaaatatcgagaaattgccttagaaaatgataacatatatttgataacaaaatgataacaccgttcagtacggcctgtggactttggacagtggaacacatataaaaccagatagaactataattcctatacaaaagtgtatagtaataagattttatttgcgagtttgagtagcggactaaattgcgaaaaagcccataaataaaggttttgcgggctgtctggatgttccggtggagtgcaaatggagttaaaaaatcttttttttctttgttttctttccggagttatctgagattttcgcaaaagtaactatgctcagaaaatataattagtgtgaatatgaagaacagtttgttttgatggaaatattttccgtcagggcagactgtttttttataccctttttcaatgatattaactccatggttcagcgataacacatatggaaactgtaaaattaaaataatttgctaaatttcggaaaatgatgtccgattttacatctgccagtacagagtatatgaagagataaatattcaaaatacaggaggtactgattatgcagaacaaattatttttaaaggcagccgatatatgtgaacttctggaggtaaaacagacatcggcttatgagatcattggcaatctgaataaggagctggaagaacagggatatttgacgcttagaggaaaagttccgacaaagtattttgtgaagcgtttctacggagtagaagatacttgttagattccacaggaagagggaaaggaatggtttcatgtgtaagagaaaaatgtatttatcagtagaagacattgcagaactctttggattatcagtttcgtttgcttaccgggtggtggaaagaatgaatgccgatctggaaagcaagaactattatgttattctcggacgggtgccaacccgctatgtagaggacaagatctatggtctggaacatgttgagcaatatttgaaggaggataaagcgatatgagtatagtgcaggaaaaaatgtatatggatgtggatgatgtgtgtgcaattcttggtgtttctaaagcgtatgcctacaatttgatgcgagagtacaacaaggagttgaaagcaaaaggctatattgtagtagctggaaaaatctctaccaaatttttggcagaaaagatttacggaatgaaggttgaggattaacaatgggtgtttacaaagaaggaaagaactggaaagtaaaacagcatggcggcgtcctcccgtgggccgccatgcctttaactgctgggaatgacagaaagaaagcagcggccttgatttctcaaaaccgccaccagtgaatataaattaagcgtgaaaatgggtctgcccagcagcggtttttttcttttctgccgctgggcagatgttttttctttagatacatgataagaggaatttttgaagattccataaagatttgaaaaatggacggacataaaagacgtccattacactatcggaaaatcagcaaggaagtttcatagtaacctttgcgccgccggtttcttttgaattttctaaaataagctgaccattatgttgtttcataatcgaatttgtaatatatagccccataccaaagtgtaactttgaattgcggctttgatcgcccatatagaaccgttcctgtgcgtggcataatgcctctttagaaaaccccgttccctcgtctgtgactgaaatttccacgaaaccgttgttattctgaacatccacataaagcgttccgccttgcggggagtagtccagcccattactgataacattcataatagcacgttctatcagcaccctatcaaatttcagcatttgagggagtgaaacagtattcatttgcagccggatttcttttgtccggcatagtgattccatataaccgaacaagtgctgcatgaacgctggcaagtctatactttcaatatggagctgataaccaaccgccgcccgtgatatatcaatcagggtttgaatatatgactgcatctggccggagctttccacgacgtaaccagcgtataatcgttgctcatcatcaagatttgtttctgtgagtaaatcagcatttccttgaataaccgtcagaggcgttttcaaatcatgggcaagcgcggcgatttgctctttctgtgtctgttcggttttccattgccgttctaacgaaattttcagattatctttcatatctgaaaaagatgcaaggacatcttcaaactctttgattttggcgtgtcctacttcaaaatcaaggttttgctttgaaacctccgcagttgcttcaaaaagcggggtcagttgtgtacgcaggttcttagcaaatctggcggtcagtatgataatgaccagcagcgaatttacagccatcaggataaacgcaagcgtgtcaggagatggaaaatattccggtagccatgacactgtaaattgagaaccaatataataccttaaaacgcaaaattcgttttcccggacaacaagtgcaaactgcctccccgtagcatattcaatatattctccctttgcgtacagcagggcaatttctttttcatcatcgtccatattgctgtaaagctcattaaagttcttgtccagaattaagtagccgcatccctgtggaatcacaacctttgtaatatccggggcaatcgtcagcgttggaatgatctcttttacctgcaattcacttagatttgctcttgtagctaatccagcatttacagcaagtccctccaaaccagaagggacaataattgccgctaccagcatgacaatgagggagatagcaaactggcgaaacaatattttcaatgtaggtttctttttcactcccatttatatcctatcccccatacggtgctgatcggacttattttgaaatgctccaatttcgcacgaatattttttatatgcgttgagatcgtagagttatcgcctattccatcaaacccgaaaacggcttcatagatttgttcttttgcaaaaacctgtccccggtttttcgcaaggtattcacagattgaatactcgcttttggtaaggggaaccggctgttctgaaacatacagtacctttgcggaaaggtcaaatcttatatcaggctcaaatgaaagtgtgctgtgatgctcccttttttctctgcgtaaatgtgccgcgacacgggcgcgaagctcctgaatacgaaaaggtttcgtaatataatcatccgcaccgatgcccaatccaaacaatatatcttcctctaatgtctttgcggtcagaaagagaatcgggcagtctaccatattcctgatctgtttgcaaaactcaaacccgtctgtgccaggcatcatcacatccaaaagaatgaggtcatagaaatgcagctttttgatgtctacatcatccgcattttgacagactgttatcaaatatccatctttccccaaactgttcttaatcaattccaagatagaaacttcatcgtcaactacaagtaagtgggtcaaaaaatcacctcccgccccattataccacattgtcgaggttactcatcattatttttaatgtcagctttccgatattcattgttgatatttacagctacggaattgcttatatccacatccacaatactgtaaacgtagccgaaactgaaatcttcccccgccacatttttgaagcgtttcgatacctgcccgatttcttcttgcagttctgacatttcaagacattcatccgttatggtatatgtcaggccgttatatgaaatttcatcatagtttgcggcgttcagctcataatacggcagagattcatttaacgccttatttttatcggcggtatcgcggagcgcaccgcaggccgataagcatataagacttacaagcacaattaccacggcaaacaggcactttttattcactgtttttacctccctcccaaccatgaaaccaaaccaaactggcaatcagcagacaaacagtgcagcatacagaaataatcataccgctgaaaaaatcggtttttacctgtgcatacagttgggggctatcccatgcaagcacagtgtaatccatagcacgaacgccccaggcccagggaatatatttccatgtagcgtcaccaagccctgttatcataagggcagctattaaactccctgcaattcccaatcccatagatgcaccttttccgaagctcattcccacaaacaaatgaatcaggtaaatgggaagcatggtaatcaacaatagaatccctgctttcaggtaaaggcttgccggagcatccctatatagtgcagcgaatgttcctaacgctaaaaatgttgcgccaaaagcacagatcatcagaaaaccaagtttaccaatatacgttgccatgcgagatgggattgttcccaacaaaagctgataatgcccggcctgattttcgatctgaacaaccagacccacaataatgccgatcagaaacgggaacgcaacggccagcacttccagataggcactgattttggttgccagttcccatctggatatatgatagtaacccgcaaaaatcgccgcacatataatcggaatcatgctgtgcatatagagcaaaatgctatgtttacacttctgatattctgctttccagcagcgaaccacagataccatagttaccccacctcctttttctcaaaccatcttgcagttaaaaatgacagcgccgcaaaccaggccagcgaaatgaccaatacaagtataatcatccaaaatgccattgccgtactctgatctgcaaccggctcaccattaggcaaaatacctaacacggaaatcataagatgcggcacccagctatacgggcagatcatccacaaagaggttgtagccgtgaaaatccctaaaacgcttccaagtccggcattaagaataaccgtgacaaagataccaactttttttgataaccataagcacagcggaacttcccataggcttgcaatgacaatacaagctgttccggccgcagcctggcaaattccgattgtcaggggaatttcgttgataactaatattgcaaaaccgcccaacagatttagcgccaggaaaatgaaattccccacacaggagtaaataccggccactccaatttttgctttccagactttgttctgcgaaacaggcaatgaagcaacggcacgatattttagtttgccattatcccgctgttcaatcaaggcacaggtgagcgtaaggaatccaggataaagcaggttataccaccaattataagaattgagctggaaccaaagaggggcaaaaaagttcataagcgcagttacaaacggggccagaacgatcagcgtttttgtgaaagttctcttatgctttaggttctctgcctgaatatatgccatctccatttaatatccctccttaccatttctgcgaataacatccataaagagttgttccaaatcttcaccggcgcgaagctctccctcatatccaaggacgccgccagcaatgatacccacatgatctgcaatctgctggacttctgacagaatatggctggacaaaataactgtaatccctttgcggggaaaagagcgaattaactctcgaagttcctcaatccctaaagggtcaaggccgttagtcggttcatccagaatcaaaagctggggactgttcagcaatgcaatagcaataccaagccgctgcttcataccaagagaaaactgcccggcccgtttcttgccggtattcgtgagctggacaatttgcaatacctcgttaattcgtgcatcgtccaggccgagcaatgtagttctgactttgagattttcgtatgcagtcagattttcgtaaagcgggggcatctcaatcaaagcaccgatatgctccagatcattccgcttccacgggtggccgtcaaactcgatgcttcccgatgtggggcgcaaaatgccggtgagcatttttaagatcgtggatttgccagccccattcggccccagcagaccataaaccgagttgcgccggatgttcagtgacacattgtttaccgccatttgccccttgaaatttttgcagaggtcagtcgttttcaaaatcatatccatataatcaagtcctttctttgattttacggatagcataccgggcaattttgaagatttcataaagattcccgaaaacagaatatgaacaatacaccgtaaccgtggagcatatcgcaacaaagcaccaacctacgcatttagggccttaaaaagccctaccggaattgagcggtctggtgtaaagcggatacgacttcatgatctccgccattcccatgccagaaacagaagagtttttctaccgactgggattaaaagatggactgaatctgaaaaatacggtaaaattagtattagaaatgatatcgtgaaatcgttaaggaaagaatcgaaggtggtgcaaacgaaaaagcagtatggagacttttcattaactgccctttcgtttgcatcaatttcgattttttctggttgaacaaagcgcgtcaactctatatggacttttaattatgacactctatttataataggatagcgtgtacacatagaaacacatagaatttataattcagtcctgtattatgacaccagaaataagcctccctaaggaagctaaaaaaatatacagttatgatacgttaacagagcatatgtggttttggttttataaaatgttgttctgtaggcagaggaataatcttaccaccacaggaagaacacttgcatatatctttattataaagaagacggataatggcaggtgcatccatatctttcagcttggaaatatattttttgcaaccaaggatgtttctgcatagggtaatctttttcttcttatttctggatgaaagaagaccatagtgcctgatacgtacaaaacgttttggaggaacatgcattaaaaatcgacggataaattcctcgccggatatggtgatctctttccaaagcccttggtttttgtaatctttagcggaaaaagtaactgtagattctgtcatgtctttgatacggtagttgctgatagcaatccggtgggtgtattttccaaggtatctgatgacagattcggcaccgtcaaatggtttcttgcaataaggaatccattcctttgtatagcaggtatttaataattccttgaaagtatagtagtttttgtaaggtgcagccggcccatgaaattcaagcctgtcattttcccagagctgcttaagttcagccatatattttccacgaaatattttggagatcaccttaatcggaagaaaaaactctttcccgttgtctttccaatgacttttcacatccagccctccaccaagaacaatcgcatggatatgaggatgaaaattcatggtgcttccccatgtatggaggatacagatatagccgatatcagtcccaagatatttactatcagcagcaagttcactgagagtatctgaagccgcatgataaagagcagtgtataagaatttctggttgctgtagataatgggattaagttcttttggaactgtaaaaactacatggaaataaggagcatctaagatatcctcacgccgtgcatctacccatttttcttttggaaactcctgacacataggacagcatctgtcacggcaggagttatagtggactgacatgcagccgcagtcctcgcatacgcttacattcacaccaaaggcaccggttttgcaattcatgatgtgataagcggtctttcgctgagcgggagaaatactatgtgtggattcaaaagatggataaaaacgatgaaaaacatcctgaatcgtacaatccttactcatgatttaccaccttccgggttgtcgaacgggctgcggattccaagaagtgtcttgttgctcacatgaaggtaaacatctgtagagcgaggatcaacatgtcccagaagtgactggatatattttatatctgtgccactttcgaataggtggctggcaaaactatgacggcacgcatgagaggaaacatgacggttaatgccggcgagtttagcacttttcttaaagaactggttaacactggctatatcaagatatccaccggaccaggaacttgggaaaaggatatctttagggcgaccacatttgtaccaatactctgtgagaaggtctaaatttttttgagacagaattgtatacctgtcaattctgcctttggtttcacgaacatgaattgtcatgttggtacgtgaaatgtcatcataatgaagatgaacaacctctgatacacgtaatccggaagaatacatagttgcaataatcgctttatgcttcagattcggagtggcgtcaatgattgcatttatttcatcgcgggatagaacagcaggaagatttcgctctcttttcatagccggaacagtgtcatcatcccagagaatcttcagcacctttttatataagaacttgattgcagaccgatagtgattgtgagtttcaggagaccttccttccagacgtttggcagtaagaaaactttccgcatcttcaagtgtaagatcagaaacattttttccaatccaacgaaggaagtaactgacatcagagcaatacagttgaatagttctttcacgcaggttacgtttttccgcttcattgcggatggattcaaaaatatctttatacataataaaacctccagaataaatagtgttaataattacatctacctattcggaggtgcgttagcgtcataattccgattgcggaagagactggaaaatgttattcttatcataggcagtggagctttcttagttcagttgtttcgtgtggtaacttaacaataacggattatggaaagtaattccactgcttttttaataaaaataaaactgcgccacagccttggcaggccatcgcgcagcgattttgttcaatcggaatttattaaggaggatatggatgaaactgtttttatgttcgcacttttcaagtgtaggaagtttgataaaagaagaaattgataacaagaaagtcgcatttattcccacagcttcgctgcgtgaaggctataccggttatgtcggctcggctcgaaagctattcaataaactgggagcagccgtaactgaaattgatatttcaacggaggcttatttaacgatacagtctgtttttgaagatgcggatgtgatatattttactggtggaaattctttcttccttatggaccagcttcgtaaaacgggaacggatgagctattgaagaaggaattggaaaagggaaaactgatgatcggtgaatcggcaggtgcgattatatgcgctccaactatccaatatattgaacaaatggatgaaaagccggaggactactcacaagaagatgatgcagggcttgatttgattgatttctatattcttccgcattatcttacagcaccatttaagaaagttaccgagaaaataatgactgaattttcggatttgaatctatccccaattaacaaccgtcagggaattgtaattgatggtgaaggttcaaaggttgtttgcaaagactaatttgaaagttccagtttttgaaactggaaaatcggaagctgaggagatagactattgagaacatatgagaataaagacgaacttaaaaacgagataaataaaagctttgcaaagtatatttcagaatttaatgatattccggagcatttaaaagataagagaattgatgagatcgatcgaactccggcagaaaatcttgcttatcaggttggctggacaactcttgttattaaatgggaatcagacgaaagaaagggtattcctgtcaaaactccttcggataattttaagtggaatcagcttggcgaattatatcaatggttcacagatacatatgctcagctgtcactgcaagaattgaaagatagattgaatgagaatatcaactctatttatgcaatgattgattctctgagtgatgaagaattatttaaaccacatatgagaaaatgggctgacgaagcaactaaaacagctgtatgggaagtatacaaattcatacatgttaatacagttgctccgttcggaacctttagaaccaagattagaaaatggaaaaagattgcactataacttccagtttgatggagaaagcaaaaatcattcatgccctttgtcatatagtttctgtatattttttggaagtttgtcaggcaacatggcatttatagcatcttcgttaccatctttcattgctgtttcgtaataccagcacttgaattttaagagggagagagttttttgaagttcctgaatttcagtttcaacagctgattttctggtttcaaataattctttccttttttcatagctggagctgccttcagatacccagataaaaaattgctttatatcttttatctcaagaccggatttcttcagacattcaatgatacgaagtgcttctaattcattatcgctgaaataacggatatttcccttacgttccagattagggaaaaagccttccttgtcataataccttaatgtagaaacaggaagattaaacattgcagagacctgaccgattgtatacataaaaaaccttctttcaaatttatgcttgacctaaagttaactttaggttgtaagatatttatatcatatactattgttagtgtaattacaagaaattttgcatatggaggatgttaaatatgttaaaaacagaagaattaaagctggtatctgaatgggataaaacttttccacagagtgaaaaagtagaccataagaaagtgacatttgtaaatcgttatggaatcacacttgccgcagatttgtataaaccgaaaaatgcatctgggaaatatcctgcgattgccgtaagcggaccatttggggcagtcaaagaacagtgttccggattatatgcacagacaatggctgaaagaggatatttaacaattgcatttgacccttcttttacgggggaaagtggaggctatccaagatttatggcttctccagatattaatacagaagattttatggctgctgttgatttcctttctgttcgggaagatgtggatccggataaaataggaatcattggaatctgcggctggggtggaatggctcttaacgcagctgcgttggatacaagaataaaagcaaccgttgcttctaccatgtatgatatgacaagagtaaatgcgaatggatactttgattctgaggacagtgaagaagcacgttatgcaaagaaacagtcactgaataccctcaggacagaagaataccgtaaaggcgaatattcaagaggcggtggttgtgttccccttccggttccggaagatgcacctttcttcgtaaaagattacagtgagtattataaaggcagatgttatcataaaaggagcctgaattcaaatgatggctggaacagtattggatgtatgtcatttatgaatcagccaatattaaagtacagtaatgaaatcagaagtgcagtccttatcgttcatggagaaaaagcacacagctattattttggaaaagatgcttatgaaaatatgatcaagaacagcaagtacacatccaataaagaattgctgacaattccgggagctgttcatacagatctatacgataatccggatgtgatcccatttgacaaaattcagaaattttttaaagaaaacggagttggttaattatgacgtgtgaagaatatttgagtaatatgaagcccggatatatcgtagatggtggaagtgaagaacatctggttatgcatgagctgtctcaaagggcattaaagataacgatggagctgaataacaaatatcatacaaaagaagaaattatacagcttatgtcggaacttaccggacaaaaaatagatgaaagttttggaatgtttcctccgttttatacagactgcggacgaaatatccatataggtaaaaatgtttttattaatgcaggatgtaagtttcaggatcagggtggtatttatatagaggatggagtcctgattggacataatgcagtattggcaacgattaatcatatggaagatcccgagaaaagagcaggtatgatatttcagccgattcacatcgaaaaaaaagtgtggcttggagcaaatgtaacggttcttccgggggttacgattggtgaaggttcggtcattgcagccggagcagttgtaacaaaagatgttccggccaatatgattgcggcaggagtgcctgcgaaagttatacggaaggttaaaaaagacactgaaaaaggagaaatttaatcatggcaaaaaaagtattgatcatatcgacaagtcttcgaggaggcagcaattctgatatacttgcaaatgagtgtgcaaagggagcaaaagaagccgggcatgatgtggaacttctttctttgaaaggaaaagatataaaatattgtatcggttgtctatcctgtcagaggaatgggatgtgtgtactgaaggatgatgttgcagatattatggcaaaagtaaaggatgcggaggtcattgtctatgcaacaccaatttattactatgagatgtgtggccagatgaaaacacttcttgatagattgaatcctttatattcgacagattattcattcagagatatttatatgattgcaactgccgctgagaatgatgaaagtgcatttgaaaaagcctacaatggtctgcaaggctgggtagactgttttgaaaaggcttccttgaaaggcatggtcggtggcggtggaattgatgctgcaaatatagctgcaagccatgctgatgtgatgaaaaaagcatatgaacttggaaagaaattatgagtttgaaaagagtactgttatttagtctgtgtatattagttttatctgggcttgtaggatgtagagaaacagaaattaccgtcaaatcgggatttggaggaaagtataatgagtatagttgttaatatatattattccggcgaaaatggttctgcgcgaaaatttgcaaaggagatgatttcaagcggtactgttgatgcaattagaaatgaagcggggaacattagatatgattattttttccctctgggagatgaggaaactgtgctactgattgacagttgggaaaatcaagagagcattgactttcaccatcaatcacccatgatgaataagattgcggagttaagagataaatataatcttcacatgaaagtagagcgatatcggtcagaagatacgattcctgacactgatcaaaaatatataagaaattgacaacttccaatttgcatatttcattaaaaggcacatattaaaattataggtaattgcgaaacaagttcgcaattacctagttgctcaaagtagtggcttttgtgtttttgatttagggcagggttccctaaattgctggtttttttggaagtgtatatacacttcctgtccttgctatttaccggtggcacagccgccggaagagagtcttttgaaaagaaccctctatagataaggtattcagagaagaaaaataggacatcgcagatctgaggtatgacgaaagaaggattctatggtatagtaaaatctgaatgagaaaagaggaaaagaggtcttaccgatgtcacggaaaaaccatgaaatgatagatggaaaattactgcagactgacaagaaatatgctcagttgaaattaaagcagaaagagaagattgcagaatggatgttccaggcaaccagggattattatatgaaaaaatacactttcccaaacgacaaacatctggaagaagtggtggatattgtgtatgaaaaaattgaagatgcagaaatctggattccgtatggagaggtattcaagcattacaaatccaaacgatcggatatcaataaacgtatcagaagatctctgaatgaaaaagaagagagtcggattgagaaggtttgctttatgaatatgtgtatgatccaagatgacaaaggaaatgtgctggcattggataaagtgaatgacagctatacagggacaacttttccaggtggtcatgtggagcagaacgagatatttcaaaaatctatgatccgggaagtttgggaagaaacaggtcttacgattgaaacaccgaagctctgcggtttatatcattggcataagggtggagtacattatgtgattacgctgtacagagctgatagatttatcggagaattgacaagttcggaggaagggcaggtgtattggattccgctggaagaattaaaaaccaaagaattggctacaggtatggaatacgttttacagatcttggagtctgagcaggtgaatgagtgttatatgcatctggaagcagatggatatgttggagatttatattaaacgaagtatctacttgggataaaatagttgttgtgatgaaaatgggagaacaataatgaatgaaaaattagaaatggcaaaaaattccttatataatgcaaatgaaataaaggatattaaagaaaatccggttgttgaatcagttttattggcacctataaaggcaatccctgttttgggggatttaattgattcatcaacaaataagttattaaatgattttcagcaaaagaaagaacaggaattgttagatgttattttgcaagatgatcattctataacatcggaaatggtaaatgatgtagagtttatcatcaattttgcacgagcaaaagaggcagtgcaaaggttggcaacgaccgataaagttgagtattttggaaatcttatacgaaatggttatttgcaggggaaacatatagatggtagtatttttgatgaatatattcacatattgaatactatgtcgtatagagaaatacaatatttagttgaatacaaaaaatattgtgaagattcatctaaaagaggtaaatcaacgaaacacataaatggtagaacatatagcaacaaatacgaatcgttttgcaatgaatattcaaagcaaataaaggtatctccaggagaagttgattacgtgttcttacatattaaacaaacgggattcattgaggaagaatttgaaacagagtctggagatgtagatgaaaatgataatacatttgactcattggatgttgaaagtaagggatattatataacaaaagagtttctggatttttatgaaatggttttgaaaagaaatgaaaataatggataaataaaaaactacttctgtgaggttgacttgcagaagtagcttttttttagatattggagggggtaataaataaagttaattgaatatccaatcatcaaaaagggcacaaaaaacaccgtatttctacggtgcgttctgtcagatatattctgttttatgatagcagaaaactggaattcacagttcttccatccttcccatcttcagcgccataacaagagttccggctgccatcacaaagacaccaatttcaatcacatagatgggaagaagcgccggacctgccacggcaaagaagtccacgataaaatgaatcccatatgcaagaaccgctgtaaaagccgctgtcctgcatttgcctgcctttaccgctcggtagattagcagtgacaacccgatatgcagaatgatggcactgattctttcgattccgcttacaaaaaagagtggtgccggtgttgtccatagggccgacagctgtgacacggtctggtttgcagactcagcaggaagtgccgccagcgtattctgcatggctccgctgttgatcatcagcatggacacaagattgctgattccggagagtcctccgatcagaatggcctccacaccgccatgcccgattccatacatcagtgcatttggaaaatccagccatttcttcatccagaacttcatggcaatcagtcttccagtttcttcaaaaaccgccgcagccaaagccgcgtatacatagtaaagccatggcctgctctgtgcgttcagtccgcagaactgaatgacaagaacatgcagcagctgctccaacagcatggcaaacagcagataggttcctgctccgataaagaacgaggaaatccttgccttaagcttcacccttcctgcaatgaacaaagcaatcggtacccccatcgagaggacaacggagcagataactcccgctatcgccagacctgatattgtgttcaattccatctttatacctccctgattctcaaaaaattcctttattgtatttgaactgtccatacaatataaagcctaatccgacaataactgctggaagaatgatataatctataattatttcactctgaaacgaaacaataaaacctaatacaagagatattcctataatcagcgttcctgtgccgactgtttttccatactttggtatatcttcttcctttacttttcgcctgttataagagtgaattgtgctgatattgcctttgatatttacaattcccacaacagatatgaacactcccaaaatcaacattataatattttccataatgacctcctaaaaatagaatagttcctcaaattttttgtccaatgcaatacaaagaattagagccaattttgcagttggattaaactgtcctgtttcaatagaactaatggtatttcttgatacccctaccatttctgcaagctgagcttgagaaagatttgcttctgtgcgaacttcctttaagtgatttttcagttgtaattgttctttcatattctcacctctaaaagatggctaacaaatccaacaaatgccaaaatggaaagcacaaaaaacagaacagtcaagaccaaatcgctctttcgcttcattttgataaaacgaactaaccattgtgttgcaataatgctgaagtatataacccacggactgtaaatcatagtatgagcaagcacagaagataacagcgaaagcaaacaacacactaaaacaccaactctgcttgcgtgacttccggcttgatataccacttccatttcagccaagtccttattgcgatgttcttttctgcttgcatttaagatttcgtcctttttcataaaaacacctccatgccaagttttctttgcatattttaattatacacatacaaagttttcttgtcaataaagttcataaaaaagttacaaccgatataagagataacttttctaccacttcgattatgcgttagattggaatcttgctagtgtgaagtattatataaccaaattgaaggaaaagaattatctgaagaagcatggaagtagccaaaaagggaaatgggtgatattaacaaaacgagattaacacttgtatcaattcatattaaactatgaaatgtaaggagagaaagatgcctagaaaaccatcattagacggcaaagattctagtctgagaatcaggatgtcaccagagcaaaaagaaaagctagtattttatgcagagagacattatcagactatgagtaatgtaatattccaggcgttggacattctttacgcaagagaagaacaacaaaataataaagagtaaaatggagttattttggagtttatttcttcattttttagcactcctctttggcacttttttgataatcccctttgtaagaatcagaaaatccgattcatacggagcaccagagaaaacatcaaaaaaagacacagaaacatagagaaaaaaattagaagccttgcatcagggaacgtcctgacgcagggctttttcagtcctgaaagaaaagggaagaaaaatagtgcagtatcccggaagcgccggaaaaggaagtttttacaagtgagtttgctaaaaaaatgcaaagtgggtgtgcgaagggacaggacatataagctttgtattctatctggcaaactagacagacttaaaagtcatattctaccttcgaggggtatgcttttcatctaaaatagagtacgattaataaaaaaaggaggtagatggatggatcttatcaaaattggaaaatatattgcaggtaagcgaaagtcattggggatgacacaaaagcaactggcagaaaaattaggtatgagtgataagtctgtttctaaatgggagcgaggagtttgcctgccggatgtatctgtttataaagaactttgttcaattcttggtattagcctcaatgagtttttggctggagaagatatagctcaagagaatatgattcagaagtcagaaacaaatattattgaagtgatcagagataatatagataaacagaaatgtctaaaggttatgaaatgtatattattagttatatctatctgtgcggtatcagtaatcggatttaccatataccgtctgaaaaaaccacagaattatatttctcctgttgcaaaggatagcatagaaatgcagacagcagaactgcttgctggaccggatggagcatttgtctataagtttatcacaacggatgaatataaaaaactcagattacatatttatcgatacgaatcaggaaaattaagtgatcaggacaaagttgaaatgggatttgaagatattggttcgccaaaaagtggtgaaatcgtaatggtgcctgatttcgatacttatgtaattaagttaattatttctggaggtggtagtaggttgtcaacagaaattcctgttttagaaaatgtagaaaatagagaatactatggcagaacagcaactgaaataaaaaatgtcgtagacattagatacgataagcagcagccacttattgcctttgtttatgataatgatgaaatgagtgttccgactttagacgattttataaatagccaaacagattttctttcaaaaaatgattatgtgtattatgtggcatttgagttttgtaagtaatagatttgataatatgtttcggatagagctgttccgtaattcatttccggtgacaaatgaaaaagaaaggaggtagagtggagaacagaccttaacgatacacagcaaaagattataaagttgctttcagaagatcatcaattatcagcggttaagttagctgaaaaaatcgggattgtcagtcgaaatattgagaacaatattaagaagttaaaagaatatggtattctcataggacatggttctccaaagaatggttactgggagattatagataaagatctacaggagtgagaagtaaattaatccaagattagtcaaatgctgagagaaatagaccttcgcagacgtaatgtttgcggaggtttttttgataaaaaattaatcacgataataatgtgatgatatcacagaaaacaaatgaatttcaggttataataaagccacaaaagaaaaaacaaggaggactgtaaaatgtctgctattaatatcaataaaaataattttcagaatgaaataatggattccgagaaaaccgtccttttggatttttgggcgccttggtgcgctccctgtcgtatggtggttcctgtcatagaggagattgcaggtgaacgccctgatatcaaagttggaaagatcaatgtggatgagcagcctgaactggcaagtaaatttagtattatgagtatcccaactttggtggttatgaagaatgggaagattgtacaacaggtttcaggggcaagacctaagaaggcgattttagaaatgctttaatgaggaaaggtggaaaaataagatgaaggtaataatcgtaggcggtgtagcaggaggagctacagccgcagcaagaatacgcagactggatgaacacgcagaaattactgtgtttgaaagatccggatacatatcctatgcgaattgtgggcttccatattatattggagacgtgatcacagatccggaagaacttacattacagacaccagagagtttttttaaacgttttcatatcaacatgaaaattcatcatgaagttatcttcatacatccggatcgtaaaactgtttcagtgaaaaatttggagaatggtgaaatatttgaagaaaattacgataaacttatcctctctccaggtgcaaagccaacacagccgagacttcctagagttagtattgataaactttttacacttcgtacagtagaagacacttttcgtataaaggaatatataaataagaaccatccaaaatcggctatattggcaggtggtggctttattggtctggaactggcagaaaatttgagagagcttggcatggatgttacaattgttcaacggcctaagcagctgatgaatccttttgatccggatatggcatccatgatccataatgaaatgagaaagcacgggataaaattggtactgggttatacggtagaaggatttagagaaaaggacaatggagtagagattctattaaaagataatccgtcccttcaggctgatatggtggtgctggcaatcggcgttacaccagacacagcattagcaaaagaagccggtctggagcttggcatcaagggaagtatcgtagtgaatgacaggatggaaacttctgtaccggatatttatgcagcaggtgatgcagttcaggtaaaacattatgttacgggtgatgatgcactgatttctttggctggtccagccaataagcagggaaggatcattgctgataatatttgtggtggtgatagccattatttaggcagtcagggaagctccgttatcaaagtgtttgatatgacagcagccactacaggtatcaatgaaaccaatgccaaaaagtcaggattagaggtagatacagtaattctttctcctatgagtcatgccggttactatcccggtggaaaagtgatgaccatgaaggtagtttttgaaaaagagacttatcgtttgcttggtgctcagattattggatatgaaggagttgataaacgtatcgatgtgctggcaacagcaatccatgcagggctgaaggcaacccagttgaaagatctggatctcgcatatgcaccgccttattcctctgcaaaggatcctgtaaatatggccggcttcatgatagacaatatagcaaaagggaccttaaaacaatggcatttggaagatatggataagatttctaaagataaaaatgtggtgttgctggatgtgaggactgtaggtgaatttaacaggggtcatatgaagggattcaacaatattcctgtagatgaactaagggaacgaattagtgaaattgagaaaggaaagcctgtgtatctgatatgccaaagtggtctgcgcagttacattgccagccgtattctggaaggaaatggttatgaaacatacaacttttccggtggattccgcttctatgatacagtggttaatgaccgtgcgctgatagaaatggcatatgcatgtggtatggattattaaaaaataatcacaatatttttataattttctcgtagcataaaaagatcccccatttattagaatgactttcataattctgataaatggaggattctttagatattatagaaaaacagttttatgatctttgtagtgtttccagtcttttcgaatccaggattgtgattttgccgcgggagagtttgacgagtccttcgccttgaaagtatcgaagcattcgagtgataacttccctgtgggaaccaagatgattagcaatcgtctcatgagtgattttcaattcatttgttccttcgatagaggtctcttctaaaagaaatgaagcaatacgcttatctaaactcttccacatgatttgttcaatcagccacatgacatcagaaaaacgggtagccattaactcattggtatagtttgcaacgggagcagattccttcatgatgtccttatagatctcagcagggatgatccaaagatcagtatctttctctgcttcaatggttacttcaaattgaatggagcgtatgatacatgaggcggataaaagacacatatccatatcgaacagacggtaaagtgtaatttctcgtccctcatctgaaagtatgtaggttcgaagctgcccggatttaaccagtaataatccagtacaatccaggtttccgttgtgaatgatcgttcctttttttacatcccgtgtgattaaattgtctgaaattatttttttctgtgctgtatttaagtcattccatagtggaaaataattttcgaagttcataacagttatctcctttacgaacatagtatacttgctttttttagatgcgtcaattgcataattgacatatgccttttatagggctattatataagaaaagcaagaaaggagcagtttatgccgagaccagtaaaatgcagaaaagtctgccattttccgaatgttttagaattccttccggcagataatgctgagaaaaaagtacccattgttctgacagtggatgagtatgagacaattcgtcttttggacaagaaaggttatagtcaggagcagtgtgcagtatctatgcagatcgcaagaacaacggttcaacgaatttatgagattgccaggaagaaaatagcagatgcactcattgatggacatccacttagaatcgagggtggagatttcagaatttgtgacggtcagagcagcaactgtagctttggaggctgttacaaacaggaaatttacaaaaaatatgcagcggaaaaaggagaaggtatcatgagaatagcagtaacatatgaaaatggacagattttccagcactttggacacacagagacatttaagatttatgatgtagaagaagggaaagtggtacattcagaggtagtagataccaatggaagcggacatggtgcattggcgggagttcttaatgcattgaacgcagatgttttgatctgtggcggaatcggaggcggcgcgcagacagcattagcggcagcaggcattaagctgtttggaggagtttccggagatgcagataaagcggtggaagcttttattaataaaacactggattataatccggatgtgaagtgttctcatcacgagcacagccacggggaaggacatacatgtggtgagcatggatgtggaagccatagctgtcattaagaagaatagcaaaaaaataataatacgaaaggatgtgtcaaggcaatggagaagttaccgcagcacatcctttttgtgttattttacagaaagacagattgtattttaaaggaacagatcgtgcagtatttcttgataagagagaatttacaggaccaatctacacacaaatcaaagaagctgtagattttgtattgagaaatattcgactcggagcaacgattgatggattggtgcgaaaagagaaatatgagctaccgccggaagcaatcagggaaattttgtttttagtttgtattcgattgtctgtggtggaaatgggattaaaaagtaacacctggattctgtaaggggaaatgtttgagcgagcattataaagatacctttttggagaatattatgttataatcattcaagagaaaggtacgatagatgagtgataagaagagaaatgtaatgttgttcgttctgctgtttaccttgtttctgggagtaatcgttccggttcaggcacagtcgtacggcgggacaaagacaatacgggtggcgtatcgtgaggacgcagactttattaataaaagcagcagtggagtatacaagggatatggagtggaatatctgaataaaatatctcagtataccggctggagatatgaatatatcaatgaatcatgagaaaatcagttggcagatctgaaatccggaaaggtagacctgatctgcaatgcgcagaaaacagaggccagggaggattccgtattctgatggatgattttggaagtggatattcttccctgaatatgctgaaagaagctcctgttaatgagattaaactggatatgcgtttcttaagtgcagcagatccttatggaagagcagaagaaatcctgcacatgatcattactatgggaaatcatatgaagctttccattattgcggaaggtgtggagaccgaacagcagaaggtaatgcttcaggggttcggctgtaacaaggctcagggatatttctatgccagacctatgaggaaagtagaatatacagagctgctcagaaaagacaaagcagaaaattagatgtacagaaggttgaataaagggctgtccgggaatcatcaaaaccggcagctctttgtcatcagaagaccaatcatataaaaactaatcatataaacaaaaaaaggagaaaattaaaagatgtattatgtaccagacggcacgaaagagtgcggatattatgaatgtaaaaaatgcggcaaccgttttctgtctatgcagacgatgaagaggattccatgcccggactgtgaggctgaaatcgactatgagatcggtccggacgagtcactggaggatgtgctggatacagcagaactgatccagaagattgagggtgaagaagaggtagagaagatggacacacttctgagccttgctctgaccggcggagattacagctggatctagtacagcgaatattaagtaactgctataacctgagtccataacgaatcctaaaaaatttttataatcttatttattgacagaggaaattatcggtgttattatgtttattataaaacatactaattcgataggaataataggtgtaaaggaactgacgatatgaaatatgatgtaggtatcattggaagcggtccggcgggtttaagtgcggcaatctatgcaaagagggctaatctgtcagccgtagtgatagaaaaagaatatgaaggaaccggacagatcgcagaaagcggacaggtagataattatccgggatttccgggcatcagcggttatgatctgggtgagaactttcgggaacatgcagtgaagcttggggtatccttcatggaacaggaagtaacagagataaagaaagaagcttcatcagattttgaacttgtatttgcagatggttcgcaggtggaagcgaaaaccgtaatctatgcggcgggagccacaccgcgaagagcgaatattccgggagaacaggaatatgcaggaaagggtgtctcttactgtgcaatctgtgacggatcattttacagaggtaaatcagtcgcagttcttggtggtggagatacagcacttgatgatgctgtttacctggcagatgtggcagagaaagtatatgtgatccacaggagaaaggaattccgaggagccgctgttacagtggcgaaactgagagagaaggaaaacgttatcttcgtactggagcatcaggtaaaagagatcatcggagagcagaaagtaaccggagtagttctggaagatgcagctgtgatagatgtgaacggtgtatttgttgcttacggagcagtaccacagacagatcttctgaaaaaatttgcagtactggatgattcaggttatgtcagagcaggggagacaggagaaaccgctctggaagggctgtatgtggcaggagatgcaagaacaaagaaactgcgtcaggtggtaactgcggtttcggatggtgccaatgcagcaaccgcagtggcagaatatctgaaatagaagaaactgagagagtattacgataattcaaccggctgtaaggataccggacagtcgcagatctggaaaaaatatttgaaaaaacgctctaaaaacacaaaggagagataaaaatggcacagaaagtagattatgcagccttaaaaaaaggcggatatatgagacagaaacagaaaggttacggttccctgagactggcagtggtcggtggaaacctgactgcagagaatattaagacagtagcagaagtagcagaaaaatatggccgcggatatgtacatatgacttcccgccagggcattgagattccctttattaaagtggaagaattggcagaggtaaaagaagcactggcaaaaggcggtgtgggaaccggtgtgtgcggaccacgtgtacgtacagttacagcctgtcagggttcagaggtctgtccaagcggatgtatcgacacctacacactggcaaaagagcttgatgagagatatttcggacgggaactcccgcataaattcaaatttggtgttacaggatgccagaataactgcctgaaagcagaagaaaacgatgttggaatcaaaggcggcatgaacatcgaatataaggaagacgactgtatttcctgtggtgtgtgtgtgaaagcctgcagacaggatgcactgaagatggtggacggcaaaatagaactggatgcgcagaaatgtaatcattgtggccgctgtgtaaagagctgtccggtggatgcatggaaaggaactccgggatatatcgtatcttttggaggaaccttcggaaataatatctataaaggagaagaactgcttcctctgattccggataaagaaacactgtttcgtgtgacagatgcggcaattaatttctttgaaaaaaatgcaaatccaagtgaacgtttccgcaaaacattgcagcgtgtgggagaagaagatttccgcagtcagctgaaagatgcgtatgaaggacagtgaaaggagaacataatggctgaattagattttgaagtaaccgatgaggttgatattaccgataaagtatgccccctgacattcgtgaaggcaaaagtagcaatcgaagaactggaggatggagagattttggctgtccgcatgaacgatggcgaaccagtgcagaatgttccacgtagcatgaaagaagaagggcataaggtactgaaattaaccgataatgaagatggtacttacaccatgtatgtaagaaaggtggaagactgatggcagtacgggtaagtaaggcggattttgaagagaaggtcctgaaggaaaaacttccggttctggtggatttttattcagattcctgtgtggcatgtaaaaagctggcaccggttctcggaaatgcggaagatgattatgaggataagattaaagtatataaagtaaatacgaactttgatgtggagctggcagagcagtatgaagtgcaggcaaatccgacgttgatcctttttaaagacggacaggcgaaagaccggaaaacaggagcactgaaacaggtagagttaaacagctggattgaaggattactctaaaaagagagcaggcataaaggagaaaaatatgtttatcacagtagcaggagagaaaaaagaagtaaaagacggactgacacttccggaactgatcgcacaggaaaatgtagagatgccggaatatgtaaccgtttctattaatgaagaatttgttgcatcagaggataaagagtctaccgtattaaaagagggagacaatgtagaatttctgtatttcatgggaggtggatgctaaatggcaatgacagatgaacagatcgagcgttattcccgtcacatcatcttaaaagaagtgggtgcaaagggacagaagaagctcctgaaaggaaaagtactgatcatcggtgcaggcggtcttggtgcacctgcggcaatgtatctggcagcagcaggtgtgggaacaatcggtattgtggatgcggacgaggtagatctttccaatctgcagagacagatcatccacagcacagcagatatcggaaaagcaaaggtaaaatcagcaaaggaaaccatgaatgccatgaatccggatgtggaagtaaaaacttaccggatgttcgtagacgcatccaacatccgcgaactgattcgagaatatgattttattattgacggaactgataatttcccggcaaaatttctgatcaatgatgcatgtgtactggagaaaaaaccattttcccatgcaggtatcattcgttttaaaggtcagctgatgacctatgtacccggggaaggtccatgttaccgctgcgtattcaagaatccgccgcccaaggatgcagttcctacctgtaagcaggcaggtgtcatcggagcaatgggaggtgtcatcggttccttacaggcaatggaagcaatcaagtatctgatcggtgtaggtgatcttctgacaggatatcttctgacttttgatgcgttgacaatggaattccataaggttaaactgccgaaggatactcatgactgtgcagtatgcggagatcatccgacaatcctggaaccgatcgactacgagcaggaggtctgtgaggaaacagcaggccgatttgccacaagagatgagcagtaaatacaagaaaaacctgatgcaaaacaggagaaaagtatggctataataagaatgagagatcatctctatgatgagatcgttaattatgcaaaagagcatcttccggaggaagcctgcgggcttttggccggagtggaaaccggggagggaagggaaatccgaaaggtatattttctggagaataaagatcatgcagaagatcacttcaccctggatcccagagaccagataaatgcgatcagggatatgcgtgccaatggattgaaaccgctgggaaactggcattcccatccgtcttctccatcccgtccgtcagtggaggatatccgtcttgcttttgattcaaaggcaagttatctgatcctgtcactgatggcggactatccggtattgaacagctttcatattgaaggtggggaatggacaaaagaggatctgaggatttattcagaagaatattatttttaaagatttacagacaggataacagaggcagaaatgtttgaagcaggattatttgtggaaacatttctgcctctgtttatactgtcagcatataaaaattccgtacattgtaaaagtatagtaatcctcgtaaataatgcatcttaatccagcccatcatagcatgaaatttccataataaagtcgtggcaaaatcatgtcaactgcagaataaggcttgaaagattatgcaaaataatgtaaactcaaagagttaagatatgtagacattatgtatgcctgtaacgtttaagtatagtatattcccacaatggctggacggttgcagataacagatcggttactataataatttgagcatcttcggtgcggatatccggagatgctttgctttggaaattgtgtgcgaggggtataaaaaaagtatgagaaaagattctgacaatgcaaaactgttggaaccgggggaaataccgtccaaaagaaaagtcctggtcgtagaagataatgaattaaacagagatatcctctcttcttttctggaagagaaatttgatgtttttctcgcagaaaacggggaagaaggactggaacttctttccgagcattacagagaattatcagtagtgctgttggatatctgtatgcctgtgtgtgatggatttgaattcctcagacgcagaaacacagataagtttctgtcaaccataccggttatcgttatgaccggaagtaattcaaaagatgcagaacttcaatgcctggatcttggtgcagttgattttattccgaagccctataactttaaacttgtaatgggcaggatcaacagtgtgatcaagctgagggagtccgtaatggcactgactgcagtagaacatgatgagcttaccggagtttataccagacaggcgtttttctatcatgcaaaatcttttctgaaaaccagaccgggggagaaatttcatcttgtaattgctgacatcagagatttcaaactgattaacagcagttacggggagaaagtaggagatgaaatcctctgctatctggcaggagcttatacaaagatgctgaagacaggtctggtatccagatatgggagtgatcagttcgtatgtatgacgtgtgatgactgtgatctgtctttggaaacagtgacaaagatagaagaagaaatcgcagagcatgcacctgttcccaatcttatggtcaaatatggagtttatcaggatattgataaatctttacctgtttctgtaatctgtgacagaggatttatggcaatcagaagtatccgcgataactatgagtgtaacattgcctattatacagagaaaatgaaacagaagcagatgcaggaccgtttgctggagaacagatttgaatctgcgattaaaaataaagaatttgtggcatatttccagccgaaatatgatgtaaaaacagagaggatcacaggagcggaatcactggtgcgatggatcaacccggatggttccatggtaatgcccggagatttcatcccgctatatgaaaaggacggactgatcgtgaagctggatgaatacatattccggtatgtctgcgaatttcagcgtgaactgatggagaaggggcaggagctgattccgatttctgtaaatctgtcgcgtacaagcatccatcattccgatattgttgaacgttatatgaagattgtagaggagaatggaatcccgttttcctgtgtgcctgttgaactgacggaaacagctactctgaataatgttatgatcagagattttacagagaaactggtaaatgcaggatttgcactgcacatggatgattttggttcaggatattcttcactgatcacattgagtgaattaccgtttaatacactgaagattgataagagtctgattgactgtattcaccagcagaagggaagaatggtcgtgcagcaggtgatcatcctggcacatggacttggcatgaaggtggttgcagaaggtgtggagactgcagatcaggttgaacttctgaaggagatggaatgtgacaatattcagggattctattattccagaccattgccgaaagcagagtttgttaagaagtcagaagagaattagaaaagaaaacagaaaaatcatcataaggaacttcctgataatatttatcggagttctgtatgatgattttgttatgttacaggaaattactccgtaatgttcctataacataacaaagcccttcgggcaggattctttcttgtagcactcctcctgaatgtattattgaagaggagtgctatagtttgaaaccgctttttgcggttgaatcttggcttgtgtattttttgttttctgatgaaatcagatgtttaacaggtcactgtatactttcagtgctccgtcagtgtcatgtgcaagaacacgttttgcaaggactttaccaagctgaacaccttcctggtcgaagctgtttaagttccatacgaatccctggaacatgatcttgttctcgaagtgagcaagtaatgcacccagagatgctggtgtaagttcttcacctgtgatgatgctggaaggacgtccgcccttgaagttcttgttcaggttctcatcctttttaccgcatgcaaatgctacgatctgagcagcaacgttcgcgcagagtttctgctggcttgtgctgttctcgatatctacgtctacaccaagctggctcttcttgaagccgatgaactgaagcggaacaatgtcagttccctgatgtaataactgatagaaggaatgctgtccgttagtacctggctcaccgaagataaccggtcctgttacataatctacaggttcaccgaagcggtttacagatttaccgttggattccatgtcacactgctgtaagtgtgcagggaaacggctcaatgcctgagagtatgggagaactgttgttgcaggatatccctgtacgtttctctcataaacaccgatcagtgcatccagcatatccggattctcaaggatgttcttattagtagcaagcttgtcctcagcagcagctccgtcaaggatctgtgcaaatacttcaggaccgaatgcaagggaaaggatcgcaccgcctacaccggaaacagaagagtaacgtccgccaatatagtcatccatgaagattgctgtcagataatcctcgctcttagccagaggagatgtctcacttgttacagcaagcatatgtttggatggatttaatcctgcttttaccagagcgttcttgacgaatgcttcgtttgtcagagtttcaagagttgtaccggatttggatacaacgatgaacagagaatgagcaaggtctactgaagcaaggacagcagctgcatcatcaggatctacgttgctgatgaattttgcttccattttaaatgtgttgtttgcttttgcccagttctcaagagcgatatataatgcacgaggacctaagtcacttccgccgataccaatctgtacgactgttgtgaacttctcgccgttttcattagtgatctcacctgtgtgaactttatttgcgaagtcagcggctttcttctgctgtgctacgtagaattcacgtttgtcaacaccgtctacaactacagcgtcaccgagctgagttcgtgcaaggtgatgaagaaccatacgtttctctcctgtattgatcacagcgccgttgtataattcctgaaatttgtcgataagctgggcttcgtctgccagatctgcaagtgcgttcaggactgtttcgtcaacctgttttgcggcatagttataagccaggccggctgccattggtgcgctgtacttctttacacgttcagcaccattttcgcctgtcatggcctctgcgatatttacatgacccttcagaccggcaagcttactgtaggaagcaagagtgtccagatttttccatgttgccataataatattcctcctttaaatgactgtagctgtatggctgcagttgctaatattgattatactgaataaatgttttaatttcaatgcaaggatgcagggattttaaatatattttccagtttaccggaatgttatttctgaaaaatttagattttttataaatatttaacaaattaaagcgtaagcattttccagtagtattagcttgaaatggtatgagaaagtatggtataatttcctttatatctgcacagctagaatacatacgaataatagcagaaaaacagttactgttccaatgttgctgagaacagtaacgaaaatatctccacaaagcgaaaagcaatatataaggaagaaaggaaaaacatatggctaacgctaaatacttcttaaagagatttgcaatggcattgcttacgatctttctggtagcatgccttacatttcttctgatgaacgctgtgcctggaagcccgtggctcagcgagaaaacgccatctgccgcaaccctggcagcgctgaatgcaaaatatggcctggataagcctgttcatgttcagcttttcatgtatcttaaaaatattctgcatggtgactttggcgtgtccctgaagatgcagaaaaaccgcgcagttctggatatcatcgttgagatgttcccggtatctgccaaagtaggtgccctcgctctgttatgggcgatcatcgtaggtgtaccacttggatgtctcgcagcatttaagagaggtaagctcacagacagtatcctcagagttatctgcactctgggtatctccatgccgagtttcgtagttgcatctgttcttcttgtaacactcacaggtgacggagcactgaatctgttcccgtccatttttgatgcgtcacaggggatcagagcctacatacttccgtgctttgcattgggattttacccgatgtgctatactgcacgtcagacccgttctgctatgctggattccttaagccaggaatatatcaagacagccagggcaaaaggtcttaagaataagaagatcatcttcaaacatgcattaagaaatgccctgatcccggttattacttacctgggaccgcaggttgcttttactttatgcggtggtttcgtagtagagagtgtattctctatcccgggactgggacgttatttcgtacagtctattcagaaccgtgactatccggttatcatgggaactactattttccttgcaacatttattattctgatgaatctggtcgtagacctcctctataaggtagctgacccgagaatcagcctgacaaagggaggagactgatcatggcagagaataagaagatcaagaaatgtccggtaagtcttcagccggatattgagaaccttcttcaggacttgacaccggatgattttgcttcggcttccagtcaggagaaagaagatttcatccaggaccgccagagtgtatcttactggaaagatgcctggagaagattaaagaagaatgttgtggcgatggtcgcacttggagttattatattcctgtttctgtttgcgttcgtcggaccacttctgatcccatatggatatgatgaatttaacgatggcgctgagaacctgtttccatatcattacacactggaagaccagcagcgtgtagatgaagagattgcatccagaactcagagtgaggttgttgatgttgattcaatgatcgagcaggctaaggcagaggcggaagccaaaggtgagaagtttacaaaaaaagatgaagcaatccttcgcgcaaaagcaaaaacagcagcaaagaatgatacagcgagtgagtctgaagagagcacagacccagatacagtccgcaaggaactgggaattaagaaacatatcttcggatattcaaagaaagaacttgagcgtaaagcagccggcgagaaagttttcccacatgtctttggaacagatatgtacggacgtgatattcttgtccgtgttatgtatggtgcacgagtttctatgtcagttggtgtatttgccgcacttctcgtactgatcattggtgctttatatggtgcgatctccggttactgtggcggtaaggtcgatgcagtgatgcagcgtatcgtagagctgatctatgcagttcctgaaatgctggtcgtacttctgatcgcaactgcactgaaaccaatcctgacagaatatatcaactccccgggcggcggtccgctgaagtcctttgccaatgtacttggtccgaaccttatctccatgttcattgccttcggtcttctgtactgggtaactatgagccgtatcatccgtggacaggtacttcagctgaaacagcaggaatatgtaacagcagccagagcactcggtgcttcaggcggacgtatcatccgtcgtcatctgcttccgaactgtatcggacagatcgttgtaacaacctgcctgcagatcccgtctgcgatcttcctggagtcattcctttcctatcttggtgttggtgtatctgcaccgcttccaagccttggatctatggcaacagacgcattaagcggtatgtatacatacacttacagactgatcgttccgtctgtagtcctcagtgtaatgattcttgcatttaacctgttcggtgatggtctgcgcgatgcacttgacccgaaacttaagaaataagagaggaggagaatcatgtctgaacagaaacataaattattggaagttaaggacttaaaagtctccttctttacaccggccggtgaagttaaggctgtaggaggaatctcctacgacctggactacggcgaagttatgggagtagtaggagagtccggttccggtaagagccaggaagcctactctattatgggacttcttcagtctcctggtaaggttgtcggaggttccattacttttgaaggacaggatgtcctgtcttttaccaaagattagatgacagaattccgcggcagtaaagtagcgatgatcttccagaacccgatgacctgtttaaacccggtttacaccattggaaatcagttagtagaagcacttcgcgctcatgataaaaagatcagcaaggaagaagctgagaagcgtgccatggaaatgatggaaatggttggtatcaacaatgtacagaagcgtatgaaacagtatcctcatgagttctccggtggtatgcgccagcgagttatgatcgccatgggtctgatctgtcatccgcagcttctgatcgcggatgagccgactacagctctggatgttacgatccaggcacagatccttgacctgatgaaagacctgcagaagaaaacaaaaatgggaatcatttttatcactcataaccttggtgttgttgcggatatctgcgataaggtttccgttatgtatgcaggccgtatcgttgaacagggccctgttgatgatattttctatgaacctgcgcatccgtatacaaaaggacttctgcgttctatgcctcgtgtagatgcagagagttacgaacgactgatcccgatagagggtactccggtcgatatgctgaatccgccggaaggctgtccttttgcaccacgctgtgagcattgtatgaagatctgtctgaagaagatgcctccttatgtagaagtaggcgagaaacaccgttcagcctgctggctgtgtgttcaggaactgatgggcaaggaggagaactgatatggcaaatgaagaaaagaaacttgtcgagatagagaatttacgtaaatacttcccgatcaagggaacaaacggtccaggtgttcaggcagttcaggatgtttccctctatattaagaaaggtgagacattaggactggtaggagagtccggatgcggtaaaacaactctgggaagaaccattctcagattgtatgagccgaccggtggtaagattatctatgacggtcagacaatttttgacaatccgttggacaaagacggcaaaccacttggcaaagcgaaatctgtaaacatgcttccttaccgtaagaaaatgcagattattttccaggatccatccgcatctcttgatcctcgtatgacagtcggagagattatcggagaggctatcgacattcataaactggctgcaaataaaaaagaccgtgcggatatgatcaaaggtctacttgcaagagtaggattaaataccgagcatgcaaaccgttatcctcatgagttctccggcggacagcagcagcgtgtcggcattgcccgtgcacttgccgttaaaccggaatttatcgtatgtgatgagccgatttccgcattggacgtttctatccagtcacaggttgtaaacatgctggaggatatgcaggcagaaatgggactgacttacctgtttatcgctcatgacttgtctgttgtgcgtcatatttcaaacaggatcggtgttatgtatctgggatctctggtagaacttggtgagagctatgagctgaaccgtcatccgatccatccatatacacagacgcttctttctgcagttccggtaccggatcctaagctgagccgtaccagaaagcgtatcatccttgagggagatgtgccaagcccgatgaacccgccgagtggatgccgtttccataccagatgtccatatgcgacacagaagtgccgtgaggagatgccacagttcaaagagcatgaacctggacactgggcagcatgtcatctgctggataaataatacagtcaagcggatattcgcctgactatttatcagagtacttacagaatacgaaaaaatataatgtaaactggtgggtaatactgaaataaatagaaagaataaaaataggaaataattaacaaaattattgttgcaattatagtaaaaaatccgaaagaaaaagcttaacataggtattgggttcctgtataatggaatttataatacaaatcgctgacttctcatacagcgaaaaccataataaaggaggacaagtaatgagaaaggcaaaaacaattatgtctctggctctgtcagtagctatggttacaagcatggcagctacagcacctgtaatggcagcagagagcgaatcaacagacggatttaatctgaatctctgtatcgcatctgaaccacagagtatcgaccctgcactgaatacagcaatggatggttctgtcatgtgccaccatatgttcgaaggtctggtcaaatgggcagacgacggtgaaggaaatgctgttacagttccaggacaggctgaatcctgggataaagagacaaacgatgacggaacagtaacttatactgtacatcttcgtgatggtatcaaatggtctgacggacaggccgtaacagcaggagatttcgaatattcctggaaacgtctggcaaacccggaaacagcagcagactactgttacatgatcgacatggtaaaaggatatgcagaggtagctgacggaagtgcggatcctgacacacttggaatcaaagctacagatgatacaacactgcagatcgatttaacttatgactgcccgtatttcgaagagatcatggcattcccggcaaccttccctgttcgtaaagatatggtagagggaagcgagaactggacatttgatcctgcaacttatatcagcaacggaccttacaagatgaaagaatggtctcataactcctacattcttatggaaaagaatgagaactactatgattatgagaaccttggaccggacacaattaaatttgcacttctggacgacaacaacgcgatccttaaaggatacaacaacggagaacttgatttcatcgagaaccttcctgtagacgaagttgctacttaccttgcatccggagaacttaacatcgctgactatatcggaacatactatgtatgcttcaatacagaaaatgaagtattctctgatcctgcaatccgtaaagcattctcacttgtaatcgatcgtaactacatcgtagataacgtaactcagtccggtgaagttcctgcaacaggatatgttccatccggtatctatgatgcagacggagcaagcggagatgacttccgtacagtaggcggtgaatattacagcgtttctgaagatgattatgagaagaactgtgaagaagcacgtcagatccttgcagatgcaggatatccagacggcgaaggtttcccgacagttgaatatctgtacaacacagatgacaaacacaaaaagatcgctgaagcactccagaacatgtggcagaaagaacttggcgtaactgttaacctggacaaccaggactggaacgtattccttcagaacagaaagaatggtgacttccagatcgcacgtaacggatggatcggtgactacaatgatccttgtacattccttgatatgtggtatacaggcggcggaaacaacgatgctcagtattctaacccggattacgatgcacagatcgatgcagcaaaagctacttctgatcaggcagagcgtatgaaagcattccatgcagcagaagatatccttatcggtgaagacaatgtactggctcctctgtacttctatacacagccatacatgctgaaagataatatcaaaggtatgtattacacaccacttggatacttcttcttcggatacacaacccaggaataagatctgagacaggaatgagtctggaaacggacagagaaagtagtttcgcattcctgcataaaaatgcataattttgaaagtaaaaacagctctgtgcggaagagtttaagactctccgcaggggctgtttttgttttagaacaggagatggtaaagttttcaggctgccacttttttatgataaaaaggtaaaataaaaaactaaattttacagtatatgtttgcataaaaatctataagatgatatgattataaataaacgttacaatagcaatcttacagggagataactggaaatggaattttgggatatttatgatgagaataagaaacctacaggacgtaccatgaagagaaatgactggtgtctgaaggacggagagtatcatctgactgtgcttggcgtagtagccagaccggatggtacttttctaatcactaaacgtgtcatgacgaaagcgtgggcacctggatggtgggaagtatccggcggcgctgcacaggcaggagaggaatcttatgaagctgttctgcgtgaggtgaaagaggaaacaggactggatgcccgaaacgcagaaggtggttatctttttacgtataagagagagaacccgggtgaaggagacaactattttgtagatgtgtaccgttttatcatggacattgatgagaatgacttacatttacagactgaagagacagacggatatatgtttgccagtcctgatcagatcagagaatttgcagcagatggaaaatttctgcattatgacagtataaaaaaggcatttgagatgtaaatatatgcagagatccgtgggaaaacctttcggatgctgcttatgatataaagagaaatgcagcatccggaaggtgattcctgagaggaaagataatgaaaaatataataaagaacagtcagaaaaggttcgggagaataatcctggtgattattaatattcttctgatcctggcggcggttctgtcttctctggtttattccgaccatatcaggaatgaaaaaacgcagatgcagatagatgcgttttgttccactatggaaggaatgaagcaggtttccggaaactatctgaagatggagaagggatatgcagagaactgggcaaattacatagaacgccagaatatgacgatggatgaagccctggattatatcaaaaacagcaattctcagaaagacaggcatgcacatattgtagatatggatagaggatttcgcagcagtaagtgatgtgaatgtgatcagaaatgagagaatgggaactgcttacggagatcagatcatccgtggagtagcggagtgtattcgtgcaagtctcagaacaggggagcaggtttaccgtattctaggagatgaatatctccttgttaatgagattggcggaacagtaggcttctgaagagtgctctggtagaggattttcatacaatccttgagaagcataatctctctacagacagtattatcctggaactgacagagagtggatatctggagacatcgcagaatgtaatgaatatgaacataaactgctggagcatattatgtaagatggaatgccgccggaagtgaagaacactgagggcgctttctttctgccgtgatataatcaaatcaaactgcgaagcagttattcggttatgagcaaatagcggagcggatgattttatccgcttaatcaagtatgaaatgatgagaggaaaaaaatatggaaaaaaatcttgagtttatcggggaacagttaaagaaattaactgcaatcccaagcccgtccagctatacggaaaaggcggcagagtatctgatggaaacactgaaagaaatgggatatgagccggagctttccaataagggaaatgtgctcgtgacgatcggaggagagggaaatccgctggtcctggcatctcatattgatactcttggtgcaatggtacgctccataaaagataacggacgcctccgtcctacaactctgggcggacatcagtggagaactgctgatggtgagaactgtactgttcatacgagagacggcagggtttatacaggggttgtgctgaatacagaaccatctgcgcacgtggcagatgagaaagtggaacagacagaagagaatatggagatcctgctggatgagaatgtagaaaacaaagaggatattgatgcactgggaatccaggtaggagatatcattgctatggatccgcggactgtgatcacagagagtggatatatcaagagccgttttctagatgataagctttctgcagcaatcctgctgggactggcgaaggcagtgaaagacgaagggattacactgcatcgtaaggtatcattgcttttcacagtatatgaagaagttggacatggcggaagctatgtaccggcagatacagcggaaatgatttctgtagatatgggatgtgtgggtgctgatcttggatgtacagagcgtatggtatccatctgcgccaaagattccggcggtccgtacaattataatctgatcactgcactggtcaatacagcgaaagcacatggtctggatttcgcgatcgatgtttatccgcattatggatctgatgtggaggcaactctccgcgcaggatatgacatcagacatggcctgatcggacctggggtttatgcttcacataattatgagagatctcatatggatggagtgaagaatacgtatgagcttgtgaaggcgtatgtgacggaataaaaaataaagcagctgttcttttatatgttttttggtaattggaatattggacaggaactgctttatgaggttaaattacaaaaaatctgcaggagatatcatataatggatatcttatctgcagattttattatttgtggatatttatattaatgaaatttcccattccagatgtgaaatataaatagcaataatattttgatataaagctgatttatttcattgcattcttaatagcagccagcagttcatcatattcttcatatgccgggatctccggataatctgctttgatcttatctgtactgcggaacaggaatccagccttgcttgcctggatcatacccaggtcattgtaggaatcaccgcttgcaatggtatcgaatccgatagactgtaaagcctttacagtagttaacttggattgttccactctcatcttaaagcctgtgatctcaccgttgtctgcaacttcaagagtgttgcagaataaggtaggtctgccaagcttctccatgagcggtgctgcaaactgtgtgaaagtatcgctgatcagaattacctgagagaaagaacgaagttcatccaggaattcctttgcacccggaagcggatcgatctttgcgatcacatcctgaatttctttcagtccgagaccatgttccttcagaataccaagcctccagttcatcagcttatcatagtccggctcatcacgtgtggttttcttcagctccgggattccgcttgcttcagcaaatgcgatccagatctcaggtaccagtacgccctctacgtcaagacatgtaatatacataatagaaatcctcctttgtgtgaaacctctttatttttgaaaatcctttaatgctttatttagtgaaatcattctaacatattctgagagtccttgcaaatttaatttttgagttgcttaaaaggagaatattgatttcctaaaatgcatatgatataatgccaataggcagaagaaagaataattaatctgacaagaataacaagaatgaaagccctgggagtggcagctcccagggctttcttcttgttttaacaaagtggacaagcaaccactaggctagtgttgtcctatttatctccgtctagccatttgcagatatagtggcagattatacctgctgcacaggagataagaaaagaaagaataatttctgacaagaatatcacctcctcccgttgccgggtattggttggacaacgttaatactatatcatatatagaacaaaaatagaaacataaaataagtattgacataaaaaaaccaaagccatataatagttaggcaactaatggatagcaacctaactatttatatggctttgcaatagtatgggtactgattttaggaggtgcggcgagatagacgaggaaatgaaacagaagctgaatgagatgcatgtaggcaggctgatacatattttatcccatacaatgaaacggcataatccggcagaggtgatggagaatgacgatctgacgaccatgcagaagcatgtgctgaaatttatccttctggaaaccatgcacagagatctctatcagaaagatattgaagaggaattccagatcaggaaacctacagtgacaggaatcctgaagctgatggagaagaacggttacatttacagagagagtgcgaaacaggatgcacgcctgaaacagatcattcccacagagaaagcagagaagattcgtcctgcaatcttaaagagtattgaagaaggcgaagccaaaatgctccggggaattccgaaggaggatgtggaactgtgcaaacaggttctctggcagatgtatgaaaaccggaaaaaatcttgcgatagcaggaatgatttttaacagaaataacgagacataaggaggacattgacgaagatgaataagaaacttttacgttcagtccgggaatacaagaagcagtctgtactggctccggtccttgtaatcctggaagtactgatggaagttctgattcctctggagatggcgaagattatcgacgtaggtattgcaaacggagatatgagctatatcatccagcgtggagtcatccttgttgcaatggcaatgctttccctgttcttcggcgtacaggccggaaatatggcggcagttgcagcagcaggatatgcgaagaatttacgacacgatattttttataaggtgcaggatttttcctttaaaaatatcgaccacttttcaacatcaggtctggtcacacgactgaccactgatatcacaaatgtacagcaggcatacatgatgagtatccgccttcttgccagggcaccgtttatgatcatcctgtcatggattatgacactgacgatcaacaaaccgatcgcaatgcttttcctgatagttgttcctgtccttggcggtacactgatctttattgcgaaaaaggcacatccgcatttcatcaaggtctttgatgaatatgacaacctgaacaattccgttcaggagaatgtaaatgcctcacgtgtagttaaggctttcgtaagagaggactatgagattgagaaattccatggaatttccagatatgtttataatctgtttactaaagcagagaaaatcgttgcatggaactcaccggttatgatgtttgccatgtatactgtaatcattatcattgttgcaattggcggaagaggaattgttctcggtggcatggaaaccggtgagctgacaagtatcattgtctacgcacttcagattctcatgtccctgaacatggtaactttcgtgtttgttatgatcatgatagcagaagcatccacagaccgtattgtagaggttctggatgaagttcctgagatgcaggataaagctgatgcagtaaagaatgtggcagatggttccattgactttaatcatgtagatttcagctatgcaggagagggaggaaatctttccctgaaggatgtaaatcttcatattaaatccggtcagacagtaggtatcatcggcggaaccggaagtgcaaagtctaccctggtgcagctgatccccagactctatgatgtcacaaagggtaatgtccaggtgggaggcgtggatgtacgcaactacaatctggaagtacttcgtgaccaggtttccatggtacttcaaaaaaatgtgctgttctcaggaagcatctatgacaatattcgctggggtgatgaacatgccagtgaggaagaagttcggagggtctgtaagctggcccaggcagatggattcgtcagtgagttcccggatggctacgatacaatgatcgttcagggtggtaacaacgtatccggcggtcagaagcagcgtctgtgtattgcaagggctcttctcaagaaaccgaagatcctgatcctggatgactctaccagtgctgtagatacaagaacagatgccctgatacgtaaggctttccgcgaggagatcccgaacacaacaaagattattatcgcacagcgagtttcttctattgaagatgcagatcagatcatcgtactggatgacggtaagatcgcaggtgtgggtacttcagaagaactgctgaagacaaatgatatttacagagaagtatatgaatcacaggtcaaaggaggcggagacgatgaataagaagaaaaaattagatcagaacaccatccaaactgccaaaagacttctgaaatatatgacaggaacccataagatacagtttatcatcgtatttatctgcatctttatcagttccgcagcaagtattgcagtatccctgtccctgaaatttctgctggatgactttatcatcccgctgatcggacagacagatccgaatttcgcagaactctataaagcacttgcagttcttggctgtatttttgcacttggtgtgattgccacatttatttatacccgaatgatggtttatatcggtcagggtgttcttaagagtgtccgtgatgatatgttcgagcatatgcagactcttccgatccgttacttcgaccagaatacaaacggatctgtcatgagcctttatactaacgatacagataccctgcgacagatgatcagccaggcgatcccgcaggcactgatggcactgtttacgatcgtggttacctttatttccatgttattgttaagtccgctgcttacgattctggcagttgtgatcatttttattatgctgaaggttaccagtaagattggttccaacagtggcaaatatttcatccgtcagcaggtatctctggcagatgtgaccggtttcgtggaagaacgaatgaatggtcagcgtgtggtaaaagttttcaaccacgaagataaatcaaaagaagaattcgacaaactcaatgaagcacttttcaagagctccgcaaatgccaataaatacggaaatatgatgggaccggtgatcggtaacatcggtaacctgcagttcgtactgacagcagtacttgggggacttctctctgtaacaggtgtgggcggcatcaccctcggtgttatggcttcctatttacagttcaccaagagctttacccagccattcatgcaggtggcacagcagtttaatgccattgttatggcacttgcaggtgcagaacgtatcttcaggctcattgacgagaagccggaagaggatgaaggttacgtagaacttgttaatgcaagaaaggatgccaacggcaatatcacagaatgcaaagagagaacaggcatgtgggcatggaaacatccacattctgcagatggttccgttacttatacagaactgacaggagatgtccgattcgaagatgttacattcggatataacccggacaaagttattctgaaagacatcagcctcttcgccaagccgggacagaaacttgctttcgtaggttccacaggtgcaggaaagacaacgatcacaaatctgatcaaccgtttctatgatattcaggaaggtaaaatccgttacgatggaatcaacattaccaagattaagaaggatgacctgagacgttctctgggaatcgtacttcaggatactcacctgtttacaggaactattaaagaaaacatccgctacggtaaactggatgctacagatgaggaagtatacgaggcagcaagactggctcatgcagaccagtttatcaaaatgcttccaaaaggatatgataccatgttaagcggagacggtgaggaactgtcccagggacagcgccagcttctctccattgcaagagcagcagtagccaatccgcctgtactgatcctggatgaagcaacctcaagtattgatacccgtacagagagtattgtacaaaaaggtatggataacctgatgaaaggccgtactgtatttgtgatcgcccatcgactttcaaccatcagaaacagcgatgccatcatcgtactggatcatggaaagatcattgaaagaggcgaccatgaagacctcattaagttaaaaggaacttattatcagctttatactggtaagctggaattgtcataaggaactatcagaaagactgcaattatttcagaacatgaataattgtggtctttctttgcgggcgttgcgttttctgcgttataatgctatgatcgtacaggtatgtggatcacagatgatgaagttccggtttacggataaaaaagaaaaattatgcagcagcaagggagagatatacgatggtaaagatagatctgatcactggttttcttggttcagggaagacgacgtttatcaggaagtatgcgcagtatctgatggatgctggtaataatattgggattctggagaatgattacggggctgtgaatgtggatatgatgttgcttcaggatctgatgggagagaactgtgagctggagatgatctcaggagggtgtgataaggactgccacaggaggagatttaagacgaaactgattgctatgggtatgtgcggttatgaccgtgtgatcgtggagccgtctgggatttttgatgtggatgagttctttgatattcttcatgaggagccgttaaaccgttggtatcagattgggaatgtgattgcaattgtggattctaagctggagcgtgatctgtcagaggaggcggatttcattctggcttctgaggtggcagatgccggatgcattgtgatgagcaagagccaggacgcatcacccgaggaaatccagggtacgattgagcatgtgaatcaggcgttggagaaggttcattgcagcaggagatttcattgtgaaatgaatggtgtggatactgctgatgttatccacaagaattgggatgagatgtcgaaagaggactttgacagaatcgcatcctgtggatatgtgatggcaagctacaggaaaccggagtttgaggcagaggatgcctttacttctctgtactttatgaatgtgaagatgactgagaaggagctgcgggaagcagctgagaagattctgtctgattctgaatgcgggcgtgtgttccggatgaagggatttatgagagtagacagtgacagcgaagacggttctggactatctgcatgggcagagtgcgatagacggcagtggattgaattaaatgctacgaagaatgaaattacaatccgaccgcttcatgtaggacaggaggtcctgatcgtgattggagaagaactgcatgaggagaaaatcaagtcttacctgaagatctgagatttgaacgcaggtcgcgaagtgactgcgttcatgagcaagtagcgaagcggattgcgaatgttcgctttactttacaaaaagggcacttgaaaattcaggtgccccattgtataatctacttagaagatgaccggaagcgtgttccggttgccctctgtgattaattataatgttaaaaagaaagtaagcatctcactttgagcggggggatgcttatttctttttatgttgatctatgtaagtcaatgccgtaaaaattactaacaataaagtaaggacttccattgtgttcatcgggcatcaccctcctttcgtgaaactggagggcaggggtcgaaacttcgcatccgggtctgttcaattatacttgttcagtataacgtgaaaaatagaagatatcaagtactttacgttctatattattaaaaacaaaacggggtatgaagttcatcgtaatctgatgaaacttcataccctgttcatttatttttatggagttttgtaaccgtaaggattatttggtaaacagatcaaccagctcctggccgtcttcgtagccctggctcttcagctcatttacgaaccagtcgtctacgccgtctacagctttcttgaaggaatcgatatccatatcagctttctctgtgaaggttacgccgtttttggattcccagcgttctttaatctcattgtcgctggaacggttgatgtaacgttcgtattcaactgccttctgaccgcattcatcaacaactgcctgctgttgtggtgtgaggccgtcgtagatatcctggttgatgcagaagaacagacagtcataaattgcatcccacatggagcagtaaggctgaacttcctgaacgcttgctgcgtcgatagcaggaagcggattttcctcaccttcaaccgtgttctgctgaagtgctgtgtaagtctctgaccagttcatgttggtggcatcagcgccccatctcttgtagcattccatcagaaggttggaacctgctacacgaaccttcaggttcttcatatcatctacagatttaatctcgcgtttgctgttagtcagttcacggaaaccgttttctgcgatacccatgcagtggagtccgtattcgccaaggatttctttcagtttttcaccagcttcgccatcgaatttcgcatctgcatcgtcgtaagaatcatagacgaatggaagagaaacaacgttgaaacgtggatcaaatgcagagtagatcaggttggagtgcatggagatctgaaccgggtccccattcatcagagcctgaataccttcggactggttgccatttgtaagctggtcagctgcataaatattgactttaacctttccgcctgtagctttttccatcagttcaccgaacttacgtccgccgtcagcccaggtacttgtctcagtagtggagcatgcgaagttccaggttgtttccggccagtccagattactgtaatcttccactgtgttgaaggagtcctttgtgaaaagatcaaccagttcctgggcatcgtcatagccctggctcttcagttcgtttacaaaccagtcatcgataccgtcaactgcttctttgaaggagtcgatgtccatgtcttctttttctgtgattgttacaccgttctggcttgcccagcgttctttgatctcgtcatctccggagcggttaatgtaacgctcatattcaactgctttctgtcctgcctcgtcaacaacttcctgctgttgtggtgtgagactgttgtagatgtcttcgttgatacagaagaacaggcagtcataaattgcatcccacatagagcagtaaggctgaacctcctgaacacttgcagcgtcgatagcgggaagcggattctcctgaccttctactgtgttctgctgaagtgctgtgtaagtttcagaccagttcatgtttgtggcatcagcgccccatctcttgtagcattccatcagaaggttggagcctgctacacgaaccttcaggttcttcatatcgtctacagatttaatctcatgtttgctgtttgtgatttcgcggaaaccgttctctgcaatacccatgcagtggagtccgtactcactgaggatttctttcagctttgcacctgcttcgccatcgaatttcgcatctgcatcgtcgtaagaatcatagacgaacggaagagaaacaacgttgaaacgtggatcaaatgcagagtagatcaggttggagtgcatggagatctgaaccgggtccccattcatcagagcctgaataccttcggactggttgccgtttgtaagctggtcagcagcgtaaatgttgactttgactttgccgcctgtggctttttccatcagttcaccgaacttacgtccgccatcagcccatgtacttgtctcagtagtggagcatgcgaagttccaggtcatttccggccagtcaaggtcgctgtaatctgcgattgtgtcaaaggagttattgccgtctcctgcgtccttggaagctgtgtcagaggaagcggaggactgatcacctgtgtaggagccttcttttgcaagagctttcggaaggaaagtggaggtgatcgggatgtatgtaacgatcagaagaactgcaacgcaggctgcgatcattggcacaactgcccttgagatctcctgcagagtaacttccagaccttttttgatcttgatgctgattgctacgaagaggtttacgcctacaggaggagttacctgtccgattgcaaggtttacagttgccataacaccgaatgctactatatcgtatccaagagccttacatacaggaagcatgatcggaatgaagatgtacatagcagagtttgcatcgatgaagcatcctgcgatcaggaagatgatatttacaatcagcaggaaggtaaactgattgtgtgcgatgcttccaagtaaattggaggctgcatctgcaataccgaatttggtacatacaaaggagaacaaagaggcacttgctacgatgagcatgataccgccggttgtctttgctgagtctaccaggatgtcaaacatatcgcggatagaaacttcgcggtagatgaccatacctacgaagagtccgtatacaacggatacggctgcggcttctgttggtgtgaagataccgccgtagataccgcccaggatgatgatcggcatcaggaatccccagaaagcatctttaaaagcgtcccagcgttctttgcctgaggctttttctctggatggtttgatgttgtgtttctttgcttccagcattactacgattaccagtgccacgcccataagaagacctggtacgatacctgccatgaacatatctgcgatggatgtgcctgtgatggaggcatatacaacgaaggcgatacttggcgggatgacaatggcgatggagcttgaggttgccatcagtgctgtggagaatggtgcggagaaaccgccctgttctaccattgcagggatcagtacggcgccaagagctgcaacagttgcagggccggaaccggagatggcgccgaagaagcaggctacgataacacatacgatggcgataccgccttttttgtggcctacgcaggtatcaacgaatttgatcagtcgtttggagataccggcttttgccatgatgtttcctgacagtacgaagaatgggattgccaggagcaggaatttgctgattcctgagtacatgttggttgctacgatcgtcagggatgtaccggagtagagaattgcgcatacggaggaaagtccgaggcagattccgatgggtacacccaggatcaggaatatgaagaaggagataaataagattgcactgatcatttatttgccctcctttttgtctgttgtgattgtgttcatgttactttttgtgctgttgtcggtatttttggcgctgtcggttttgcagcagaagtccagacagaattcaatgaagtgaaggatcatgcatcctgcaccgatgggtacgaaggaccagaagatccattcaggccagtttaatacgaaggttctttttccattctgaagctgagtaattaccttgtccattccgtatttgaaaaggatgacgctgaagatgatgctcaggactgtgatcagaattacggatggtttcttcagtttctttggaaggcggtctgtgaccagtgtcaggctgaccagttctccttcgcggcaggccagtgcggctgccagcagggtgatgagtacgaataccgctactacaagttcttctgtgaaggaccaggaacggtggatgactttacgggaaaatacgtttcccacagtcagcaccaggatcagcagtgtggagatcacaaggacgatcttttctactgcagccagtgcgttcatgatttttttgtagattttcatgctctctactcctctcaaaaaatttgctgctgtttttcggaatttggagcagattcaaggcagatggaatgtaatggttataatatgtaattagttacatttttcatctgtggtgaattctgttgtctgcgaaaaacagaagtagtgtttcggtttcagatcgacagcctggaaaagaaagtatgtctcgtgtgtcagggcttttttatgttataggaatattatggagtaatttcctataacataaaaaaagtccgccccacgcagggacggacatatgatattccgtaaccaccctgtttcacctttgaaacaagtacgattctgcaacgtaccgatatacgcggctcctgtaacggggggcggccggggaagcttactgtgaatacgacaatatctgtgatggctgtattcaagggttcggctttccttctcggggatgatattcgaaacaggtctgtcactgcatttcaccggactgcagttctctgaggacagggggggactgtttttactggttcccttcgttgaatttatgcgttataggtttagctgtttaaaaagctaaagcaattttaacgctgtttgttttgaaagtcaagaggtttttgtaagtatttgggggaagtttgttggtgtggggcgtacacagcgcaagaggggacgcgcgaagcagcatctctctgcaggttcagttccgggggctaagtaactctaaggtgggggaaatccgctaaaagcatgaagaaaaatgcaaaactcgctccgtcgcagactccgctcagacaggttgctatttttcttcataacgcggatttcccccacctaagagttactaagctccctccagattcacctgcagagagatgctgcttcgcgctggctattggctgtgtaagagaaaatggatgaggtggtgggagcggaggggtcaagtgaaaagaatcagttgttactcttgacaatcgaatgattttctgcgtatattttggataagtaaaattatgaaaataaatgagtaaaagctacaaagatgagcagaaagaggtaaagatcatggatttaaagaattattcaacaggggtacagcatatcgggattccgacaaatgacattgataaaactgtggagttttatcataaacttggttttgagactgcatttgagactgtaaatgaggaagcgaatgagaaggttgtgtttctgaaactgggaactctggtagtggagacttatgagaatcatgcggcgaagatggagcatggagcgatcgatcatgttgcacttgatgtaagagatattgaggagattttccggtatattaatgaagctggtttaaactccacacaggataccattcatttcctgccattctgggaaaatggtgtgaagttttttaccattgagggtccgaacaaggagaaagtggaattcagtcagtatctgtaaaacagaaaaagttacggaatatacctgtataataaaatgaagcagtaaagccgatacattgactggaagcagtgtgtcggctttttagctgtccggaatagaccgcagcagtgaaaaacgggaaaaataaaggggcattaaagggaaaagagagatgaaaaatttaaagaagtggtatattaatctgtcgatacagagaaaaattctgtattgtacgttaggggtagcattggttgttctgttggctgccagtgtttcgcagtatatgtctgcatcttcaattgtgacagaacagacaaggaagcagtctgcgggagtggtgaacgagttgtcggtgaatttggatcattattttgatatggtgaggaattcatttgagtatattgcaaataacaatacggttcaggaggaattggagtctgatgaaccatataaatcggatggcacagagctgtattcctattattcaagatcagggcagatcagaaggctgcttttacagggatatacaagtatttatatgaatgatatccagctgtatggttataacggagcaaatcatctgctggcaaataatcatgagattaatgaaaataccgctcagacatcctgtgaactggcggagcaggcaaaaggacgctgtatttattataatgcttctgaggaaggcctgatgtatatggcaaagcagatcaaagattctctgactatgaagccagtgggaatattgagagcatctattaagctgagctatctgaaaaaaatgacgatcacagccagagattctttggctgcacatatttttcttctggacaatgacaaaaatgttctgatagagagtgcagagaatgatgcgacaatcagtgacagaagctggatagaaaaaatatcaggcaacacaggagaatttctgtttactgcagatggacagggttatgactgtgtatatcagagaagttctgacacaggacttacagttgtaggaatgatccctatgagtttcttgcagaaaacagccagaggattacagaaaacgacaatcatgcttattctggcaagtttgatgttgtgtatttttcttgctaatattctggcaaagggaatcgccggtccgatcaagcgtacaagtaaagcaatgcagcagtttgcggagggtgacttttctgtccgtcttccggaaggaagaagggatgagattggagccatgaattctgttttcaaccagacgatagagaaaatagagcagctgataaaacaggttgtggagatggaaacagttaacaaagatattgaattccaggctttacaggcacagatcaatccgcattttctttataatgtactggatacaatcaactggatggcgcgaaaaaaaggtgaggataatatttgtcgtatggttacttctatcagcagtctgatgcgtgcaagtatcagcaataaaagaagtatagtttatattcgtgaggaaataaaatatgtacaggattatctttacatacaggaaaccagatatggagataaatttacatcttatattgaagtggatgagagattaaatgaattagagattccgaagatgactattcagacactggtggaaaatgcggtagttcatggtgtagaaaatgcgacatgggactgtttcctttatgtttcaggagaaattacagatggaatggcagtatttacagtaaaggatgatggagttggaatgtcacaggagcagttggagaaattgatggggacagaggaagagccagatcatgaagcagagcggacacatacccatctgggagtatatgcggtgagaaagagactggattatgtatatcagaacaaagcaaggatgagcattatatcagaaccggggaagggaacacaggtaatactggaaatcccgatgaacggtaatgtcggagttacctacaggaaatgtgatgaacctgttaatgaaaataacaaaaaaaggggagacgagagataatggaattgcaggtaatgatattagatgatgaatatattattctggatggtttatgttcgtttccatggagcgattatggataccgtatatccgcaactgcaaggaacggattggagggtctggagaaactggagcaggcgaaaccggatctgatccttacagatgtgaagatgccgggaatggacggactggattttgcagaaagagcacatgagatttatcccaatgcggttatagtgatactgacaggatatgacagttttgcctacgctcagaaagcaatcagcattggtgtggaagaatatcttctcaaacctgtggactatgatgagttaaaggcaatggctgcccggattgccggagaaattcatgcaaagaaggaaaaacagcaggaaatccgggatttgaagaaatatttcaacaggtcagttccgcagctgagatccaaatttgcgggaaatcttctgtatggaagaatccagggaaaaggagttgtaaaagagcaggcagaatctctgaatctgacaatagagaaatatattgtgtgtgtagggcgaaaagttgttggagaaaataaaatccatacaggagataaatggatagaggaatttgcatgcatcaatatttttgaggaaatttttaatgattttggaattcatgttttgagcgattataatacagcaactgcagaatataattttattcttttgtttgaaaaggaagaagaaaacgcagtatgtatggaaaaagcattgcaggcatgcagtaagatacaggtagaagtagaacggtatctgaaagcacatatgaattttggattgagcgatgtagaagtggacgaatatcaggcaaatgcacagtaccgtaaggcacagacagcatgcaggcaatgtgtttatctgggtacgaatatcatactcagatacgaagatctgcaatataaaaaacagacagactttgtgattacttccggtgaaaaaacacattttatgatgactttgtttcaggacagttttgagaaagcggaggatgaacttcatcagatatttcgaaacgcaccggaagatgtatctccggtgaaatttgcagcaatggatttacttttgggatgtatgaaatttccatatatctgtgcagttgacagtgaaattcataataaaaactggaatctttctgtgcttcaggatggaataaaaagaatctgtcagtgcgagaacacagaagaggtgttgaattgtctgctgaatctgtttggaacgctgattaaacagaatacagaaggaactgatgaacggaaccggaaactggttcagagtgttctttcttacattgagaagaattattcaggagatttatctatggatgatctgactgagaaattccatgtaagcagaacctatatcagccgccttcttaagaaatatgccggaaagagttttctggaatatctgacagatgtccggttccaacaggtggagaaactgattgcagataataaatataaacaatatgaaatcgcagaaatggtaggatacaaagactttggatattacataaaagtattcaaaaagcgttacggtattacacccaatgaattcaggaaatatatataaacagcgaggttaactgtatcaggtaagtcatttaatcgaatcaggcaagtagcgaggcggatgattttatctgcctgacgatagaacaggagatttgtgcacagtataaaatttgtgcacaaatctcctatttttacttttatttccaattgtttataaaaggcaaaaagactaaaataaaatcatcaagaacgaggaaacacaaattaaaaggaggaaacaagtaaatgaggaaaatgaaaaaagtgttatcacttgccatgacggcagctatgacagccagtcttctgacaggcatgggagcagttacagcttctgcgaagaaatcggatgatggaaaaagaacgaagattactgctttattaaactcaacagaatcgacagaacagtatcaggtttatgactatttgttgaaaaatttctgtgatgagaaaggcattgactatgaaatagaaatggttaatgataaacaagattattttacgaaattacagatgtatatcaatagtgatacattaccagatatcttcggatgccccaatggaacactttctaaagcatgtaaagacattgatgcattagtggatttaggtgctgagttagatcgaaatggatatgcggataagatgaatggtgcggtacgagatttccttacagatgcagatgatggtaatttgtatcttttcccacagggattatattgtgaattctttatgtataggaaggatctctttgaaaaagccggtattaaagaaactccgacaacatggaaagaatttgaagaagactgtcagaaacttgcggatataggagaaattccggttattatcggtggttcagatgtatggcagattatgagatatctttcattctctccatggagagtaacaggtccggaatttatcactggatatcaggctggaacagactcttttgcccaaaatgaagctgccaaatatggtgtaaatctggtttatgatcttggaacaaaaggatattttgaaccaggatttgcaagtgtagattacacttcagccacaaacttattctatggtggcactggtggaattttctacagtggttcaggtcagatcaatcttgctgaggatatgtatgatgcaggtcagataggatttttccctgtgcctgacacagaagaaatggataatatggagacaaatattccaattcacgcaggatttggtattggatataataaggctacatatgacgacactatgcaggaattctttgattatgcatgtgaacattattcagaggcttgttacaacaaaggaaatattttctcaccgtttaacgatgatattccagaaggacttccacagcttttctatgatcttcagccgttatttgaaaatgctgaaacagcatggacctcatgggatgataagcttgattcagaaaatctgacccaaattgcagatgaacagcagaaactggctcagggaattaccactccggatgaatttatcgaaacctgtgattcttttgtaaaaagtaagtgatttttcaataataataaacagagactgacagctgccttgtcagtctctttcagagaaagagaggaggaagaactgtgcagaaagcatttggaaaaaagtcagtcatccttttattcatctttccagcatttcttatttatacagcatttgtaattgtttccatcatatgggctggttattatagcttttttgactggggtggtgttggagagaaagtatttgtaggattaaaaaactatatagaacttgttacgcaggatgaagttttcagagctacaatagggcatactcttgtttatactgtaattaatgtggcaattcaggtatttggaggtttattatttgcgattctcctcagtcgtattaaaaaaggaagagttgctttacagactctgtattatattccggtagttatctcttctgtagcgatttgccagatttttacaaagttattatcagtaactccaaccggtattgtgaatcaggtattatcattcatcgatccatctctgaaactgatggagtggatttccaatcctcagatttcactgtatgtaacagcttttgtagaagcatataaatacctgggactgtatatggttatcttttatgcagcactgatcggtgttccggatgaactgggagaagcagcactgatcgatggagcatcaacatggcaggaatatctttatgtaagaattccttatattaaaccggttatcattgcaaactgtctgctggtactgaatggttccctgagatctttcgagttctcttatctgttaacacatggaggaccgggaaatgcttctgaacttatgacaacttatatgtataaacaggcgttcagcagtatgaaatatggttacggaagttctgtagcgatcatgatcgtaatcatctgtatggtagttggaatgttattccgtaaatttacaggaggaggggatgacgaatgaaaaagaaaaaaacaaccattccgagcatcattaaatgggttatcgcattaatccttgttgtgatgcaggtttatcctttcttctatgtatttacttcaagttttaagtcactggatgatttcagacagttaccggcatatgcactcccgtcaaaatgggtgctgacaaactttatcaatgtttttacaaaaagccatatgctgacttattttaaaaacagtatcattgttttgatcggtgtactgattcctctgcttttatttgcactgatggctggatttgcattaagcaaaatcaaattcaaaggcagaaaatttgtccttaattatttccttcttggattgatgcttcctatgcaggttgcactgattccattgtttactatttttaataagatgggactgatcaatacatacccggcaattattttgccacagattgctttttcactgtcttattccattcagctgttttattcattcagcaaattcttccctgaagaaatgctggaagcagcgatcattgatggatgttcaccgataggatgtttctttaagatggtggttccgatgtcactaaactctattatcacagtagcaaccatgcaggcagtattctgctggaatgagtatattaatgcttatacatttaccagatctacagatatgaaaaccattacacttggtttaaatgacttcgtaggaagcatgggactgacagactggggtggtacatttgcagccatcactgtaacagtacttccggtatttattttctacttcttcagcagcaagaagatgctggcaggtatgacagcaggtgcagtaaaaggttgataatatgcaagaattacctgataacagtagtttgatttatgagtaaataacaggcttgccggaaaagtacaagcaggcctgtaaagtgaaataaagtataaaaaaggagattaagactatgcagaaattatactatcagttcccgggaacatggtttggcgattgcatgccatttggacatggagataaattctatttatatcatcagagagataccagaaaaccgggaccatttggagaaccatttggctgggatctggcaacaacttctgattttgtacattacgaagataaaggcgtggcaattccgagaggaacagatgaagaacaggatcagtttatctttgcaggaagtgttttcgaggcagaaggacagtatcatattttctatacaggttataaccgtgattatccggcacttggaaaaccatctcaggttctgatgcatgcatacagtgatgatcttgtaacatggcacaaaactcaggatgcacttaccttcactccacaggaaggctatgacccggatgactggagagatccatgggtgatccgcgatgaggaaaatgatcagtatctgctgatccttggtgcaagattacagggaccaaagacaagacagacaggaagaactgttaaattcacatccaaagatctgaaaaactggaagtttgaaggagatttctgggcaccggatctctatactatgcatgagatgccggacttatttaagattggtgactggtggtatcatattgtgacagaatacagtgacagaagtaaaatggtataccgtatgagcaagagtctggaaggtccatggatcgcaccgaaagatgatgcatttgacggcagatcttattatgcaggacgtacttttgaactgaacggacagagaatcctctttggctgggttgctaccaaggatcaggatgatgatgacaataacttcatctgggcaggaacatttatggcacatgaggtttaccagagagaagatggaacccttggtgtaagaattccggaaactgtatggaatgcatttgataaagaagaaaagacagaagattttgtaattgatactccaactaagagtacagaaaaagtagttgcaaaagatacaggagatatcttcaaattcgaagcagatgtggaattcacagaaggaactagaactttcggtgtgagattctatgaagatgaggataaagctgagtcttaccagttcgtatttaatgtaacagaagacagatatgtatttgagaaaaaaccaaactggccatggcctgcaaaccagaatatcggactggagagaccgctggaactggtacctggtaagaaatacaatatcaaaatgatcgtagatgatacaattgctacaatctatgtagacggtgttgcattaaatgcaagagcatataaacgtccgggagaaagtctgtcactctttgcttctgaaggaagcctgaaagtaactaactgcaaggttacaaccggattaaagaaatagagccagatagcaatttaacctataaaccgtggagcagttattcggtgtagagtaacgtgacgaagagattgctgtaaataaaaaagttgctgtgcgtttcagttatagaaatgcacagcaacttttttgccttaagtcgattggaaaaaacagctttttttgcgtttaatcttccaatttgattttctctttcagaaccacacatccggccatatctccgataacgttgacgcaggttgcacccatatcgcagagtgtattaatgctgatgtaaacgcccataactcctgctggcagacctgccatggttgcgagggctgcgaaggatgcgatggcaccgcctgggattccgggagttcctactgacaggagtacgtttgccagaaggattacgatcatcatggaaatgcttacgttaattccgcatgcattggcgaagaacatgatcatgaatgacatcaggatggatacggcatccatgtttacagtagcgccaagaggaatggcgatacttgtgattttgttggatacgcccatttcgtcttccatacgctgtttgctgatgggaatggttgctgaactggagcaggttccgaatgcgttcagggctgcaggaagcattgctttgaagaatttcacagggctttctttgccgagaaattttacggagccgccgtaaatgaccagggcaaatccgaaaaatgccacatacaggatgatcagctgagttgcaagtgaaatgatggtttctgtaccgttggcttctacaacaggaacgatagtacagaatacaccgataggtgtgaagtacataactgtgctgattactttcaggcagacttcgttgcaggaatcgatcacattcagaagtgctttacctttttcaccgatagcgataagtgtgaagcctacgatgactgcgaatacaagtacctgaagcatgtttccgtttgtgaaagctgcaaccgggttggatgggatcaggtttttgatggtgtccagaatgctggtcatctcagttgcctggatgtcggaagttgccatctcgaatttaacaccctcaccgagatggatcagccgcgggatgatcagtcctgccaggctggcaagggctgtggtgcacaggaaaaagatcatggcaccggctgtgatcttgccggttgtgcgggcatttccgatactggagatacccatgataatggaacagaagaccagtggaaagatcatcatgttcagggcattcatgtaaatgcttccgataaggcttgtgatggcaagtaccggttcgaaacggtttgccagaaacagtccggtaatgataccaaggatcagaccggtaaagattgctgcggtaatatgttttttataccacgaatagaattttttcatttgttccctcctctttattttcatttcctgtaggcgtttgcgaaacgccacaagccgcataaatacggcattttttgttacctataaacaaataactcctcaccggatatggtataatagagttgactaaaaactataaacctacatccaagaaaggagttattctgatacttatgataccatataaacagctttctttggcagatattttttcagattgccatgaaaaatttgaaaatgacaaacctgcttttctttctctattagaaacccatatcgatattgatgagttaattccgatttcttttagaaatcatttctatgcatcgacgggcagaacccgtaaataccctttgcaagcttttctgtgggctttgattattcaacgtattttctctatccctacggatcagcttctcctgacttttctcgcttactcaaaatcacttcgggaattctgtggttttactaaagtcccagacgcttccaaaatcacccgattcaaacaggattttttagatgacctccagcttgttttcgataaccttgttgatgttaccgagcctatctgtcaggcgattgactctgcaaaagcggatatgaccatctttgattcttccggcatagaagcatttgttaccgaaaataatcccaagtatgctaacaggatcatcaaacagcttaaggcatacgcgaaagctcagggctttgataaatcctatgatccttataaagctgcctatggttccatgccttctcatgcttctgctaatcctgagattaagcagctctatatcaatgggcatttttgctatgtcttcaagttcggcattgtcactaacggattgggcatcatctgccacatatctttttataacaaaaactttatggcttcacatcctgatatcgttgtcgaaaagaaatccgattcccctgacgaagataaatgtgttcatgattcaaagcttttaatccccacacttaaggacttcttttccaagcatcctttgattaatccaaaaaccttcctgggtgatgctgctttcgataccgcacaactctataagagccttcttaccggtgacacttttggtaatgacaaacatttctcgaaagcttatattccgctgaatgcaagatccggacttgaaaatctggattattccatcaatgaagatggtattccgtgttgtccccatgatccttctttacaaatgaagtacgaaggcacttccaaacttcacagtggagtaacaagatataaatttgtctgtccaagaatgaaatggatttatgataaatcaactcaaaaatcccatcgtcattgtttctgtgacaacccttgtacttcttctaaatgtgggcggatggtctacatctacccggaaaaggatcttcgtgcttatcccggaacgatccgcggcaccgaaaaatgggatgatacctataaaatcaggactgttgtcgaaagagatatcaaccacatcaaagacaatctctgtcttgcaggacgccgaacccaaaatgagaggactctgcatgctgatctgattcttgccgggatcacacaacttattactgttgttctcgcagataagatcaatcaccacgaatatattcgaagcataaaaccactcatagcttaggacttaccactttcataaagtccatagcttattaaagtgcgcctaacatgtgcgattatccatttttcattccacaagtcgtgctcttcgcgaattcttccttgttttggttcaaggttacgaacgagcaccgcgagtttcgcaattacctattattatatggacttattccgcaaatccttgctgttccatttcatgttctattttaccttcattttcctgacttgctgatacgaacaggtgacggaatacgaatctgcagaatggtccgacaaccaggatctgcagtgggtaggctatgatgaagttcaggcagatggtctggagccagatgaagatgagatttgaagtgattcctgaagattcgatggttccaagcaggctcatcagcggtaccattgtgcagacggtgaaggtctggatgcagaggatgatgaagatcgggcggtcagttggtttggctacgcggaacgcgaaatatttggatgttttgctggcgatgaagaatgcgcagaggaatccgatgaaccattccagcggaaaagaatgcagtgcgtgactgaatgtagccgcctgaagtccaccggtgtggatagcgacgttataaacgcccatgataaagattatacagccggatgtgataagggtgaaaataaattcctgaaattttgtttttggcatagttaagccctcctcataaaataataaaaaactccatataaacgcaaaaatgccgcctacccgtctgacaatggataagcgacattttttgtcgtatttattctatcagttattgggattctatgtcatgggaattttgcacaaaatataatcgtgaaataatagctttagagtctttttgacaaagggataggaacgtttattcatggatgaggataaaataaagtataaatagaagttacaaattcacttgacaaccgaataattttctgcgtatattgtaaaaaaatgagatattcagtgactgagaagtctgattatggttactggttattgcgttctcagtaacggattatgaaaagcagtctgacataacgagcgacaaaaagtcacaaggatcagcagaaaggggcaaaaactatggatttaaagaactactcaacaggggtacagcacattggaattccgacaaatgacattggtaaaacagtagaattttatcacaaattaggttttgaaacagcatttgagacggtaaatgaggaagcaaacgagaaggttgttttcctgaaactgggaactctggtagtggagacttatgagaaccatgcagcgaaaatggagcatggcgcgatcgatcatgttgcacttgacgtaaaagatattgaagagattttccagtatatcaatgaagctggtttaaattctacacaagataccattcatttcctgccattctgggaaaatggagtgaagttctttacaattgaaggaccgaataaggagaaggtggaatttagtcagtatctgtaaataaaaaggaaataatcattaagggtcgatacattgacggaaacagtgtatcggcttttttggtaatgttggattaataagtgggggtggtgcgaatgcgtaaaaaatatcatgagctgtctttggcgaaaaaattttctcttacaagtattggcttcttttttctcacaatccttgtattaactgtattgattcagtttttatacgaaaaatcagtattaaatatcaccagcgaaagctataaggaaaagtttgagatagtgtctgataacagtcagagtatattagagaattcgggaaagatagctaaggtaatattaacagatgaagcaatacaaaactggtttttacaggattctgaggaatcagcagatcagttaaaatataaaatgcaggtagagaaacgtctggattatttggatgcattgtatccagataaacagtatagcagtatttctgtttttgactcatatggacatatggtaaattctaacagtattcgatctgaggcatcaaaatacgaacagttttttaacataataaaagagaattataacgtaaaatggttggatttatatgaagtatccctgggagattatgagaaaaatggaattggttatatcagatattatagagattacgattcgggacttattaaaggatatgttcttatagaatatcagtcgccacttctgataaataactttgcacatatcagatatggggagacaggcagttatctgattgctgatacagatggaaacaaaaaaatagaaaatgatcaggatgtatcaggaaatatttcggaagaagagtattttcaatgggctgaagataataaaaaaggaggaaaagtattcaggattgacggtaaaagatatcttgtgacagcgtcagtaatccctacactggattggcttatgattggtctgacaccagtgaatgaacttacaaaagccgggaaagcgatgacacagattatttatgtagtaggaattattgctgctttaatcagcacatttttcagcctgagggtttctcacagtgtaacaaagcctttgatatatttgacagataccatgaaaaaatttggaaaaggagatctttctgtacgtgttcctgtattgtatgaggatgaaattggaatattatcggaagagtttaataagatgtctgaacaaatcaggcagctggttgatcaggtatatagagagcaacgggcaaaaagaaaatctgagcttgcagcacttcaggcacagattaatccacatttcttatataatacattgaatagtgtaagttcgcttatcaaaatgaattgtccggatgaagcatttatcatgattcaggcgattggtacattttatagaacttcacttagcgatggaaaaacattaataccgctggaacaggaaataacaaatatagagaattatataaaaatacagaaagtcagatatggaaataaaatagaatatgagattgatatagaaaatgaaattttgcaggagtggattgtaaaactgacacttcagccattgatagaaaattctatatatcatggtataaaggaaatgaggggaaaaggaattatccgaatcaaaggatggaaagagaagaataaggtttttattcaggtgtcagataatgggcttggaattccagaagaaaaattagaagaactgtttagtaaagattacagagaaaaaggctcagcatttggattatttaatattcaacaaagattgcagatttattttggaaaagaatatggtcttacagtagaaagtaaactgagtcagggaacgaaggcaacagtgtgcattcctgtagattttaagagagaagaggatagaaaatgagggtattccttgtagatgatgaatttttgcagagagcgttagtgaaaaaaacagttgactggaatagtctgggtatggaaatatgcggagaagcagaagacggagaagaagcattaaagaaaattttggaagaaaagccggatattttaattatggatattaatattccatatatgaatggaattgaagtatctaaaaaagtaaaggttatttttccagaaatacaagtaattatattgaccgcttatggtgaatttgaatatgcaagggaggcactttcttttggagcagtcagttttgtgctgaaaccgttggaccctgaagaattaacaaaagagcttcagaagtgtaaagaaaaactggaacatatttatagacagaaatcttctgtaaagaaaatgcaaaaggatcagtttcttttagaacagctttcaggtatggtaccttctgaaaatcagcagagtaaatgggaggaaatgaagattccgtttgataaaccattatcagtggtcttgattagacctgaaaataaacaacagaataacaaaatggcagaagaaatggaagaaataatccaggattattttccggtatatgaaatgatttctatgaaccaaggatatgcttttattctatttggagaagagaatatggaatatcagattcagcttctctgtacttatatgcaggaaattatgaatagtaaaaggaactggaatggaggaatcagcagggtattttcagacatcagagaattgaaagcggcctatcaggaggcatattctgcagccagaaaaggaaaaacagaacagaaaattctgatttacgagccagtagatatgtttcaatttatacgatcatcgttatatgattcggaagtatttttgtattatatcagaaaaaatgaatatgaaatgcttacaaaagagataggtgaaatgtttattcaaatggaagaacagaatgtcctttctgacacagcagtatatatatctacggatattctgatccatatttgtctgtatatgtctgaactgggagttgatttttctttagttgtggaaaaagaacagagacaattaacaggattgcagaataatggtggaattgaagaaattagaagtgtattaatgtgtatattggaaaaatgccgcatatgtgcagcagaaaataaacttcctgcaacaaagaaaaaagtaaatgatgcagtagattttattgatagtaattatagtaggattgatatgagcttgaatctggtagcagatacaattggggtgaatgcgagttatctaagtaatatatttaaaaaagaaaaaggatgttcattaagtaagtatttgactcagacacgtctggaacaggcaaagaaatatcttacagagtatccggataaaacacttatagaaattgcagagtcaataggatacagtgacgtttattattttagcaagaattttaaaaagtattatggtatttctccgtctaagtaccaggaagagagaaaaatgtaattatccaaaatatttcccagacgtccaaagaatctacattcacgtaatagcacaaaaatggtaatcttgtctcatcaaaagacaggaggtaaaaggaaatggctgaaaaggaaattccatttcgacaaattcatctggattttcacaccagtgaagccattgagggggtctgctcagaatttgatgcggaagagtttgcccagactcttgcggatgcgcacgtgaattctattactttgttttcttgtggacatcacggaaatttatattatgattccaaaatgtttccggaaatggtccatcctcatctggcacacagagatttgttgagagaacaggctgaagcctgcagaaaacgtggaatacaggtaaacctttatacaaccattcgctggaacaagagaatcgcagatatgcatccggaatggatctgtattgatgaaaacggagcacttcaggactataagggaaaggggtattttgaggctggtttttataaaaacctttgtgtaaatacaccgtatcgtgatttcctgaaaaagcagttcggagaagttctggaaacgattccgggagatggagtatggtatgatgcagcttttatgaatgaatgctgctgtccatcctgccagaaacttatgcgggaaaaaggtctgaatcctgcaaaaaaggaagaccgtcaggaatttgcaaggtggacttattatgatatggtcgaagatctgaccgcatttgcaaaaaaatataatccagattttcatgtctgctataacaaaggacatgttggatatctcgataaaccagtgataaaggattattcgtatttttcttttgaatctcttccgggagtagaatggggatatcttgattttcctgtttctgctaaatatatgaggaattttggaaaagagtgtcttggactgacaagcagattccacacagaatggggcgattttcatgcatttcgtaatgaggcagctatggaatatgaagtattttccatgctttcccatggatgcaaatgtacgattggtgaccagatggattactggggaaaattgaataaggacatgtatcagcagatcggaagggtttataaatctgtagaagaaaaagaactctggtgtgagaatgcaaaaccagtatctgaaattggtgtttttacagcagaagaattttatgctacaggcgtagcaggacagattccaggtgcatctgaaggtgtggcaagacttctgatggaatatggatatcagtttgattttattgacagtacttctgattttggaaaatacaggttgttaattttaccggatgtaattcctgtagatgaaatattaggccggaaactgagtgcttatataaatgcaggaggcaaattactggcaagttatcagtctggtcttgacaaagatcaccagaaatttatgatctcagaactggcagtaaaatatcttggagatgcaccatatagtccggattttatatggccgaaagaacatctggcaaagggtcttgcagatgcagaacatgtaatgtatgacaaaggaacacttgtagaagcgacagatgaggctcagtttgtccagaaagtaatcccgccggtatttaatcgtacatatgaacatttttgttctcatcttcattctccatcaggaagaaaagaagtatatcctggtattgtggaaacagaaaatacagcgtattttattcatccgatttttacaacatatcagaactgggcacctgcatggtataaaaagatcctgagaaatgaattagacagaatgcttccgaatccgctgattcagcataatggaccatcaacaacacaagttacagtgttagatcaggaacaagagaacagaagaattgtacatgtacttcattatgtaccggtgaagaaatgtaaaaatcttgagattgttgatgacattattcctttatataatcttaagattactatgacagaagaacgtgaagtagagaaaatttatacaatacccgataaacaggaagttccatttgtacaggatggaaaaaaacttgaatttactctaaaagagattaagggacatcagatgactgctgtttgttacaaaaattagtaaggaaaagaggaggtttttatatgaagacagggaaaaaagttttaggggctgtattagcggcagcaatggcattatcatctattacaccggtatttgcagcagataaagttaagattacatttatgagccgtgacagtggtgatacacctatggcaaaggtttatgaagaccagattgcagcatttatggaagaaaatcctgatattgaagttcagaacgattctgtttatgaggaatctgcttataacaataaactgaaagttgcattatctacaggagaaacaccaaatatcttttattatccggcaattgccggcctgaaagaatgggcacagaatggagttctgttggatctgacagattcacttaacgaagatgaagaatggaagaacacgttcctggatggagcattagatacatatgatctgagtgcttatggagtggatggaatctatgcattgccaaatgaactgaatgtggatgctattttctacaataaggctttatttgaaaaagccggtattgagaaaactccagaaacaatggatgaactgtatgaggatattgataagctggttgctgccggaattactccgtttggagtaggcggaaagaatacctgggttatgggacatatctttaataatattcttgctaaaagaatcggaagagatggcattataaaattgggtactggcgagaaaaaatggacggatgatgatgtagtagaatgcttgcagattacaaaagatttaaaagataaaggtgcttttgcagagggatttgaaggaatggattataatactcagatgaatcagttcctcaccggagaagtagcaatgatttctcacagcagccctatcattcctgaaatgtttaattctgaatcagaaattttggatgatatttcattctttgcattcccatactttgaagataaaccagagtataaagatacacatgtagtatatacttccggatggatgctttcaggaactatgagtgatgaggaaaaagaggcaactctaaaactggtgaaatatatgacatctaaagagtctattcaggaacgtatgaatgcagcgatgagagttgctccatataaagatattgatgcaccggaagacgcaccgcagattttcaaagatatggttgaatatacaggtactattacagattctgtaggagaatattttgactatgatacctgctctacattagtagatacttcaagaaatggaattttgaacatgatgctgtctgattccgctgagaatacagcacagactattcaggcagatattgatgcaaaccgtccacagagctgacagataaagcaaaaggaaggggggagagcacccttccttttgtttactcaaaaatagaaaagaggaggggttattttggaaaaaataaggaaaaataagaaagttattgcggtatttttgatacctgcagtattgatctatctttgttttgaattgatacctgtagttatgtctgtctatttttcatttaatgactggcctgggcttcaggcggtgccgcttaaatttgtaggatttaagaattatagtaatctgttccataatgcagtttttcttaagtcgttgcagaatgttcttatttacgttgttgtaagtgttattttgcaggttcctattggatttggacttggattactgatccatcatttcaaaaaaggacagagattttttaaagctgcattttttattcctatgattttatcagtgacagcagtagcattgttatggaattttatttattttcctactgacaagggaattctgaatagtcttcttattaaaattggacttggaaattatattcagcagtggctggttaatcctaaaacttctttgatatgtctgattgttgtcagtacatggaccagtgtaggatattatatgatcatttgtttggctggtcttacttctataccggattctgttttggaagcaggagaattagatggagcaactggctggaaaaagatttggaatctttatattccaatgctttgggaaccattaaaaatgtctacgatcatggtgatcactggagtattaaagatttttgatactgtatacattctgacacctacaggaggaaccagtaactgtactattgtaccagcacttttaatgtataatgaagcttatagatatggtcattatggaactggaagtgcgattgctacggtcatctttgtattaagtgctgctgtttctatttttagtttgaaacttatgaatcagaaagaatccatagaatattaggggggatagatcatgaaaacaaaaaaacattccgcagggtattatataggatttctgatatttattatagttgctttgatcaatatttatccgatggtattttcaatcttctgttcttttaaaggaaatttggaaatattttcatcatttactgctttacctaagaaattacggatagaaaattatttaactgcatggaatgtgggaaatataggaagatattttttgaatacaattattcttgcagttggaactcttgcgatatcaggtctttttggagcaatggcatcgtatgttctggcaaaatttaagtttcgcggaaaatcaaaaatatatttactgtttatttcaggaatgatgattcctattcaggcggtattaattccgttgtcttatatttttggaaaacttggaattatgaataattatccggtattgattttgctttatgcggcgttttgttttccaatgacaattttgattcttactggatttatgaatggaattccgacagaattagaagaagcgatggtaattgatggagcaaatatttatcaagtattttttaagatgattttgccactgtcagttccgggaattgtaagtgtttcaatttttaattttatacaggtatggaataacctgttgtttcctcttatttttatttctgataaagataaaggtactatttctatgggacttcttgcattttttggagaatacagtacagattatagttccagcatggcaggaatttgtcttacaaccattccggtaattattgcgtatattttcttccaggaaaaaatagagaatggtttaatgagcggagctgttaaagggtgataaaaaagttgttgtacttttcatttccaatatgaaaagatacaacaacttttttgtattccttatgtattaatcctcaagcttaattttctctttcagaactacacagcctgccatatcgccaataacgttaacgcaggtagcacccatatcgcagagtgtattgatactgatataaacacccataacacctgccggcaggcctgccatagttgcgagggctgcgaaggatgcgatggcaccgcccgggattccaggggttccgactgacaggagtacgtttgccagaaggattatgatcatcatggaaatgcttacgttaattccgcatgcattggcgaagaacatgatcatgaatgacatcaggatggatacggcatccatgtttacagtagcaccaagaggaatggtgatacttgtgatcttgttggatacgcccatttcatcttccatacgctgtttgctgatcggaatggtcgctgaactggaacaggttccgaatgcgttcagagctgcaggaagcattgctttgaagaatttcacagggctttctttgccgatgaatttcacggagccgccgtaaatgaccagggcaaatccgaagaatgccacatacaggatgatcagctgagttgccagtgaaatgatggtttctgtaccgttggcttctacaacaggaacgatagtacagaatacaccgataggtgtgaagtacataactgtgctgatgactttcagacagacttcgttacaggaatcgatgactttcagaagtgcagtacccttttcgccgatggcgataagtgtgaagcctacgatgactgcgaatacaagtacctgaagcatatttccgtttgcaaaagctgcaaccggattggatgggattaggtttttgatggtgtccagaatgctggtcatctcagttgcctggatgtcggaagttgccatctcgaatttaacaccctcaccgagatggatcagtcgcgggatgatcagtcctgccaggctggcaagtgctgtggtgcacaggaaaaagatcatggcaccggctgtgatcttgccggttgtgcgggcattaccgatgctagagatacccatgataatggaacagaagaccagtggaaagatcatcatgttcagggcattcatgtaaatgcttccgataaggcttgtgatggcaagtaccggttcgaaacggtttgccagaaacagtccggtaatgataccaaggatcagaccggtaaagattgctgcggtaatatgttttttataccacgaatagaattttttcatttgttccctcctcgttttcgtttcctgatacccgaaggactatattggcagacggattgagtgatgcgcaaatctggtaaaatttctgagtcctataactgtgataagataccgggttcaggaaaaatagcacgacactactttaccacaataatgtgtgaattacaatatttcccgctgttttcttatttgagtgggagtgtttccgaagtgctcaaggaacatcctgcgaaatagtttgtaattggtaaagccatgccgctccagaatgacatgaacaggatctctggttgtgatcagatcacgataaataaaggaaaggcggtattcattctgatattcgagaaatgtaattcccatttttttcttgaacttaacatcataaattaattgcgcgtcgcattctcgttactttagtgaaattattttataatattcctgtgacataaaaagtcctatgcaggctattatgattgtcaggtgcaggtgaagagggtataatagttgtaattatttaaccaaatcaaggaagtccctgcttcaattgtaaagagcaataagtagtgggtggggatttacttgtatcagaaggagtgtttatatgaaaccaactattttattaataaattttcaggatcagcagaagcttcgcaagttaaagatggcgttgctgccttttaagcttcggattaaaaccatagaaccccaggactatagtcagccaatcggatatctggcaggagtaaaggacgtttttcaggtgcagattccatcagcgctgatacctcaggagcagatggagaaggaaatgctgattcttgcaggaatcaccgggaatctgtttgaccaggtgctctataccttgcggaaagcaggtacacctgtggattacaaggcagttctgacggagcataatcagaactggaactgtatgcagctttataaagaactggagaaagaacataatatgtatcacccgtcttaaataatagaaatagttggaggttttggctatgaaggttgtagttgcagttgattcatttaagggaagtatgacttccatggaagcaggaatggctgtcaaagagggtattcttgcagcaaagaaggacgcagaagtggtcgtaaagccgctggctgacggtggagagggaactacggatgcgctgatcgaaggactgaagggagagcgtgtggatgtgacagttacaggtccttatcatgagccggttcaggcatattatggatatctcagggaaagtaataccgcagtcatggaaatggcaacagcagcaggtatcacactttcagataagaaggagcctatgaccgctaccacctatggagtgggagaactgatccttcatgcaatcggcagaggtatccgcaacttcattatcggtattggcggaagtgccactaatgacggcggagtgggtatgctgaaagcacttggctacagatttctggatgaaaagggagaggatgccggagaaggcggacaggcacttgcaaagattgtatctgtagaaatttcagacaaaaagcaacttctttcccagtgtaatttcaggattgcctgtgatgtgatcaatcctctctgcggttctcagggagctacatatatctatggaccgcagaagggagttacctccgatatccttccggttctggatgcaggcatgaaaaactatgcagaggttactgccaaagtgattggtaaagataaccagaatgcagcaggtgcaggtgcggcaggcggacttggatttgcatttctgaattatctggatggagagctgacaccgggaatacagcttattctggatgctgtccatatagaggatgagatgaaggatgcagatgtggttgtgacaggggaaggtcgtctggatcatcagactgccatgggaaaagccccagtgggcgttgcgaagcttggcaggaaatatggcgcaaaaaccattgcatttgcaggaagtgttacgaaggaggcagttgcctgcaatgaagtaggaatagatgccttctttccaatcgtgcgcggaatttccacactggaagaagcaatggatccggacactgcaaaagcaaatatggctgcaactgcagagcaggtattcagactgttgtaattattttttataaaaaatcttctgaagcagataggaaatcgatttgatatgtctgcacaggagatttttgtttgcagaaattgcaatgttgagaaacttcagatgatatagtaaaattattacagccagagaaaatactttgaaaaaagttgattaaaagatctaaggatatgtaagggagagacaacatgacactaacacagatgaattatatcatcacaatttccgaaactggttcattaaataaagctgcggaggcgttgtatatttcccagccttctctgaccaatgcagtgaaggaactggagaaggagcttggaatcattatattcaaccgtagcggccgtggtgtgacactgaccaatgacgggacagaatttctgatgtatgcccgtcagatatacggacagtatgaaagtgtggttgagaaatacagtgagggtggttcctataagaagaaatttggcgtttccacccaacattattcttttgcagtgaaagcattcgtggatatggtgcagaagtttgatgtgtcggaatatgaatttgccatcagggagacaaagactgcagatgtgatcagtgacgtcagcgccatgaaaagcgaggtgggagtactttatctcagtgatttcaacagaaaggcactgctaaagcttctccactctgcgaatctggagtttcatcatttgattgactgtcaggcatatgtatatttgtggaaaaatcatccactggcaaatgagaaatctatcagctacagccagctggcaaaatacccttgtctgtccttcgaacagggagataagagcagtttttatctgtcagaggagattctgtctaccaatgaatattccagaacagttaaggctttagaccgggcgactatgctgaatctgatggtaggactcaatggctacaccctgtgttccggaatcatctgcgaggagctgaatggcagtgactatctggcaattcccttcgaaggggatgagcagaaccagaacagcgacatggagattggttatattaccagaaagaattcaatcctcagcaaggtggggaatctgtatgtctcttcactgaagaaatatctggagcagaatacaatttcggagtaatcagtaactgagagtctggattatctgattacgattctgctgcgtgttgtaggacagatattgtaagggagaaaaacatgaatcttgaatatatttgtgaacagatggtacgcattctgcatggaaatattacctgtatcagcgaatctggtgcaatagaagcctgttatggggacatggcggcgcagtgtaatcctttatttacggatccggaatttctgtctgctgttcatgagcgtgagagaaaagattatccggatcttttttatgagaaagatacgattctttatgcggtcgtttcattagaaaatgcaaaaattgtggcaggtcctgtcagcactgaaaagcatataaaagattcagaacattatctgatgcagcaccaccatatcagtgatgagacgggctttcgtctgtcgttttgtgagcttaaagtgtttgtctcaggaattctgatgctctatcatatgataacaggaaaagaactgacgattaatgatctctggcagaagaatggaattcgggaaacagatattatagaagtgaaaggacagatttccagcgttatttttgagcatcaggagcaggaacttccacataatccttatgatcaggaagtgcgtgaattggatagtatccgtcatggagatgtggaaatgcttaaccgcagtttagctgaaacttatcgtggagaagtaggacagcttgccaaaaatcaagtccgccaggcgaagaatattgccatctgtgttatcgcacttgcatcccgtgcagccatcagcgggggaatgattccggaagaggctttttccattgtggatggttacattatgaagattgaggatatgaataatgcagtaaaaatcgattccatgatgcgccaggcagaatacgaatttgcagaatgtgtggcagaaattcataagaatcagcagaaaaatgagctggttgagtggacaaagaattatatttatcagaatctccacagtgatatcgttataggagagattgggcagaaaataggggtaaatacaagctatttatcggatctttttcataaggttgaggggactactatacagcagtatatccgtaaagagaaaatacgccttgcggaaaatatgcttcgttattctgattatgaaataaaagaaattgccagttatctgtctttttgttctcaaagttactttggaaatattttccggcagcagacggggatgacacctgccagatacagaaagaaatatggaaaatggaaagaaccaaaataaatgatagtttgcaaaaataaatgatataatatccgaaaaatctctgttagtatacatgcataagcaaagcaaaacagggaggaaagatgatgctttttaaaaaatttacaaatgaaaatgcatccgaaaaagttacggttaaagaacgtctggcttatggatgtggagatttttcaagtaacattatgtattctgcaatggcagcatttctgttattttgttacacagatgtagtcggggtaagtgctgcggcaaaaagtcagtttgagaaatttatgattggttgaaataatatagtgtaagatctggaggatatattataatgaagaaacttctctacggagcagcatattatgatgagtatatgccatacgaccgcctgcagcaggacgtggcaatgatgaaaaaggcaggaatcaatacagtaaggatcgcagaatccacatggagcacctgtgaaccacaggaaggtgtttttgatttctcacatgtggaacgtgttatggacgcaatggaggaagccgggatcaatgtgatcatcggaactcctacatatgcaatccctacatggatggtgaaatctcacccggatgttatggcagaaaccgtaaagggcagaggaatctacggagcccgtcagattatggatatcactcatccggtgtatcgtttctatgcagagcgtgtgatccgtaaattaatggagtgtaccgcacacagaaaatgcgttattggttttcaggtagacaatgaaaccaaatactacggaacagccggaaagaatgtgcaggagaaatttgtgaaatatctccgcaggaaatttaataatgatctggatgctatgaatcatgaatttggtctggattactggagcaaccgcatcaacgcgtgggaagatttccctgatgtgagaggaacaatcaatggaagcctcggagctgaatttgaaaagttccagagaacgctggtggacgaattcttaagctggcaggcagatatcgtaaatgaataccgcagagaggatcagtttatcactcataattttgactttgaatggcggggatattcctatggagtacagcctgatgtaaaccattaccatgcagcgaaggcactgacgattgcaggcacagatatttatcatccaacacaggatgatctgacaggggcagagattgcatttggcggtgatatgacacgttctttaaagagagataactatcttgttctggaaacagaagctcagggttatccaggatggactccgtacaagggacagctcagacttcagggttatagtcaccttgcaagtggttctaacagcgtaatgtactggcattggcattctattcataattcttttgagacatactggaagggacttctcagtcatgacatgcaggagaatgcgccatatcgcgaagcatgtattatgggtaaggaattctcagaaatcggaagtcatctggtgaatctgaagaagaaaaatgatgttgctatccttgtaagtaatgaggcattaacggctctcaagtggttcggaatcgaggcaactgcggcaggaaataatggcattggatacaatgatgttgttcgctggatttatgatgcactgtatcagatgaatattgagtgtgacttcgtatggccggaatctgataatctggaacagtataaagcaatctttatcccggcactctatgcagcaccagatgaacttctggaaagactgaaacagtatgtggcagatggtggtacgttggtggcaacatttaagacggcatttgcgaatgagaatattaaggtaagtcatgaaatgcagccgcatattttaagtaactgcttcggaatcaactatcagcagtttaccttcccgaagaatgtcggactgactggaagtattatccgagaaagtggtgcagatgaagcagataagaaaaacgaaacaaaagaaattattgagactgaagaaaatacagatgtgcctgcaacagctaaagtattcatggaattattaatgccacaggaagctgaagttttggcattttatgaccattataattggaaagaatatgcagcaatcactaagaatcattatgaaaaaggaactgccatctacattggttgcatgacagatgacaatactttaaaagcagtgatcacagaagcacttaggagcgctgagttagagcttccggaatacagatggccggtgatcgtaagaaaaggaaccaacgatctgggaaaatgtgtcagatatatcctgaactattctgcagaagaacagaaagtttcttattatggaaaaaacggtacagagttgttatcaggagaatctgtacaggatggagaaagcatcacggtttcaccatggaatataaaaattgttgaagaagcataaaatataggtaatgtaaaacacagggagatttttcttatagatattcctgtgttttatattgtctttaaatattgatattatattgtgcaaaaactataaaagacaaaaaactaacaaatgaatgacaaaataacaaacaaaaaggacataattctttctttaaatgaatgtaaaaattgataaaatgttcttatagaaaacacagagatatatacaaatatcacaaacagggaggaaagaaataagatgaaaaaatttacagtgtgtttactgatcggtgcaatggctgcaagtatgcttaccggctgtggaagcaatggtggaagctctgattcttcagactcaaaagcagacagcagttcagaaacaatgactattatgatgaacggttctgattcagatgcatatatggaaggataccgtaagatcattgatggatttaatgagtccaacgagtatggagtaaaggtagaaattcagaacgtaaccaactctgactataagacaaaactgacaacaatgatggcttctgactctgaaacagatattatctttacatgggaacttggatatcttgaaaactttgtaaatggtgataaaatcgtcagccttcagaaatatctggatgaagacgaggagtggaagaacagcttcaatggaggtatcttagatcctttaacatatgatggtgaagtatatgcgattccgactcagcagagtacagctatcatgtattataacaaagcaatttttgataaatatggtcttgaagttccgactacatatgatgagtatgttcaggtatgcgacacattaaaagaaaatggagttacacctgttgcattagcttctacagcggatgatgcatggcttgtatctcagtatatccagcagctgagtgatggaattaaaggcgaggatttattcaactctataaaaggcggcacaggaaaatggaacgatgaaggtatggttgaagctggtaaactgttccaggaagaagttaataaaggatattttgaagatggatttaccggagtatcaagagaagaggcacagttacaatttgcaaatggacagacagcaatgtacttcaacggatgttgggaaatctccaatctggataagaaagagaatgctgcagaagcagaaaatattagttgtttcttaatgccggcagtaaatgaagaatatgcaggtgtagaagttggctctgttgatacttcttatgcgattactaagaactgcaagaatgtagatgctgcagtagcactgttaaaatatatgacaaacgaagaatcaacttcttcattactttatgattatggacgtttcccaagtacaaacattgatatcgacgattcaaaattaacaccgctgtgtgcagatttcgtaaatcttctgggagatgcaaaggcacagacgccatggtttgaccgtgtagatactgatcttggaaatgaatttaacaatacagcaattggaattgcaaacggtgatgatgtgcaggaagcatttgataccctgcagtcttatgcagaaagcaagagtaaataaacagattgttaaataaactggcggaacctgagattttacattgggttccgcttgttaaaagggagagttgtctatgaataaagtaatgggtaataagaaaaccatagcactttttgtattgcctgcatttattatttatgcaatctttgcattagctcctatcttttataatgtgtatctttcattatttgatacagacctgatgtcaaagatgaactttgtaggaatcaaaaattatctgagtcttttcagtgataaaacatttaaacatgcatttggaaataatattctgatggttgtcggatctttggtggcacatatgccattagcaatgttctttggtaatgcaatcttcaaaaaaatcaaaggtgcatcatttttccagactgtatttttccttccatgcgtaatctgtggtgtagcagttggtcttacatggacattcatttacaatggtaactatggtcttttgaatggattcttaaaggcaatcggacttggcggtctgcagcagatgtggctggctaacaaagagacagcaatgctttgtatcattattgttatcatgtggcagtatgttggttatcatatggtaattcagctagctgcaatgagaaatattgattcttctttctatgaggctgctgagattgatggtgctacaggctggcagcagtttaagtacatcacatttccgcttatcaaaccaatcctgaaaattgacgcggttctgattattacaggttctctgaaatattacgatctggttgctgttatgacttcaggtggaccaaaccatgcaacagaggttatgtctacatatatgtattatcagtcatttaatattctgaattatggatatgccagtgcaatcggtgttgttttaatgttactgtgtatgttatctgtaggaatttccaacagagtattcaagacagacgaaacagtgtaggaggtgttgggaaatgaagagaagtacctcagaaaatatatggctcgttattaaatatgtatcgctgatcgggtttacgattctttgtatctaccctcttgtatggctgtttttgtcatcatttaaaacgaatgctgaattgtatacgaatacatggggattaccggaacagtggtcaatgacaaactatgtaaatgcagttgtaaaaggtggtgtattcagatactttggaaactcagttattattgctgtttctgcggttctggttactgtaatccttgcaacaatggcatcttatgcaattgccagaatgcattggaagcttgcaaaccttacacatagtattttccttttaggaatgatgattcctatttatgctctggtaattcctctgttctctatttttaaggggatggggcttctggatacacatcttgctgttattattccgcagattgctgtaggatttccgatggccattttcattatctgcggatttatgagaagtattcctacagaacttgaagaggcagcaattattgacggatgtacggtatttcagtgcttctttaagattatcctgccaatagcaaaatcttcagttgtaacagttgcagtcgttcagtttatcaatgtgtggaatgatcttctgttgccgagaatttttctcacggacagttcaaaaatgacgctgccggtaggacttaccaacttccaggcgatgtattctacagactatgtaggtatgatcgcggcggttattattacaattattcccagcgttgtagtttatatcttattacataaacagattatggaaggtatggttgcaggcgccgtaaaaggatgatatgattcagaaaaaagaaatcactgcttcttatatggggcagtgattctttgaatcaggaaaaggtggtaatgttatgaatttgttgattgcagatgatgaggctgtaattcgcaggggactgctgagtcttgactggaaatcaataggaattacagatgtgtattcggttgcaaatggagtagaagcgaaagaacttttattgagcacatcgatcgatctggttatttttgatatcagaatgcccggtttcagtggactggaactggcgcagatggtgaaagaacggtctatggatgtggccgttgtacttttatctggattttcagaatttgaatatgcaagatcggcaatgcgatatggtgtatatgaatatctgcttaaaccggtttctccaaatgaactgatggaaacaatgcataacgttatgcaccgtctggaacagaaaagatttgaacagaagttattaagccagaaggatgaatttggggaaaagcatgatgcggtatcgcaggtaaacagtctttttgtacagtcgtccaatacgattaaatctattttgacagatattgcacagaactatgaacagaatatttctttatcagaccttgctgagaaatatcatttttcagagagttacatttcacgtaagataaaaaaagaaacaggttacacttttgtagatattttaaacggaatccgcctgatgtgtgcagccagtcttatcaaaacaggtgaaaagataagtgatgtgtgtgaaaaaacagggtttaatgaccagcattatttttcacagctgtttaagaaaacatttggatgtacgccgtcaaattatagaaatgaaaatggtgaaaatttcccgggactttatgaaatactgaatagtaaatcaggaaatggaaagtgatatgagaaggcgcgataaattaaaacaaactggtgttttaaaaacaaatggaagtttgatgaataagatttttaaagtctatatgctgttaatgtttgtctcatgtgttgttctgatggttgttttcggaattcgtttttccagtgtttataactcacaggcaagatcacatatgaacgatgttactgtagcagcagaaacaggattggaagaaagaatcagccagattgatcagctttctgtgtcgattctgatcaataacagtgtgcaaaagaacttaaaagaaatcaattatcagacactggtgaatccggaaaatacatcctttcaaactgaaaaagcagcgatttccagcgaaatccgaggaagtgtttttaatgtcccgggaattgtttcggccaggattttttctctggataatgtggaaattgtaataggaacctctggtaaaagaatcaaagcagatgatattacaaaagaaaaaatctatgaccaaaatggagggacactgtgggcagacgatgaagaaaatggaatgattgggttatatcgtgccattctaagtgttgatgattttaaacctatcggatatatgattattgagtgtaaaaattcatatttcagcgaaaaacttcaatctgttcccagcacgtataaaaatcgtttttaccttttgaataatgatatggacattatcgtatccagtgagaaaaatatgtatggaaattcttttccactggaaacgagagactttaagaatgtaaaaattgtcaaggatcccagtacaggagagaatagctattttacatatcagtatgtgaataatggatggcttctggtttccactatcaatgtggggcagttgtggaagaatataggaattgcactggtgagtgtacttattacgtttggaatcgtgcttttggtttctctgataataatgagatatgctgccagagttatggtaaaaccgacaaagaaactggtagatagtatgactgcatatcaggaaggaaactttgattcccgattcaaggtggaaagtcaggatgagatcagccagattggtatggtttataaccagatggcggataaggtacagaatctgatagagaagaattatacgctggaaattgcaaacagagaggctgagattgaatttctgaaaatgcagatcaaccctcattttctgtataactgcctggatacgataagctggcttggtttttcaaatggaaacagtgaaataacggatctggcagttgctctgggaaaatttctccgggcaagtattaaaagggaagactattatacgataaaacaggaaatggaggttgtagataactatttatttatccagaaatacaggtttggagacaaaatagagatcagacataatattcctgatgaagtgctgaatttctatataccaagctttatcattcagccggttatagaaaacagtattgtacatggtctggaagaacagattgaaaaaggaatcctgtggatcaatattcagctatgtgataacaaatatcttcagtttaatctgacggataatggaaaaggcatggatgaagagcagttaaaacaggtcattcagaattatagtgataaaaataaaaaaagcggtattggattgagtaatgtatatcgaaggctgaatttgttatatggagaagcatgtgaatttcatgtgacaagtgtagcgggagaaggaacagaggtgactttcaggattcctgtaatgcaggtacctggcaatcatactcagaatgaaatataaatgtttggtggaggacatgacaatgaatgcaaaacagaactacaaatggaacgaactgacaatgggaacctgttattatccggaacactgggataagaaactctgggcagatgatcttgacagaatgaagaaggccggaatttctgtaatccgtattgcagagtttgcatggagcaaagtagagccggaggaaggtgtttttacctatgatttctttgatgaatttctggatctgtgcagtgaaaagcagatgaaagttatcttcggaacacctacagcaactcctcctgcatggctgacagagaaatatccggaagtcttaaatgcacggaaagatggtgtgcttctcagacatggaggaagaagacattataattataactcaccggtttatcagagactttgtgcaagggttgtggagagggaagctgctcattatgcgaaacatccggcaatcgtgggatggcagattgataatgaaatcaactgtgaagagaatgagttttattcagaggcagattctgttgcatttcgtgaatttctcagaaaacagtatggaactctggagaaattaaatgaagcatggggaactaccttctggaatcagacttatacagaatgggatcagatttatgttctgcgcccggttttaagtcagggaattaatcctcatcagcatctggattatatcagatttatttcagagagtgcccgtcatttctgtaaaatgcaggcagagattatcaaaaaatatgtaaaaccgggagactatatcacaacaaatggtaaattctggaatcttgacaatcataaaatggagaaagagtctcttgatgtttattgctatgattcttatccggattttgcatttggtctggatcgcgatccgctacacagtgatgatctgaatgatcgtaaatggtcccataatctcgcagaggtacgttctatttgccctcattttggaattatggaacagcagtccggtggaaatggctggacaaccagaatggaatcaccgtctccgcgtccgggacagttaactctctgggcaatgcagagtgtagctcacggtgctgattatatttctttctttcgctggagaacctgtacatttggtacagaaatctactggcatggaattctggattatgataatcgcgagaatcgtaaatacagagaggttcaggatttctataagaagttaaaagcaattgacggtgtatgcaattcagaatataaagcagcatttgcaattgttaaagattacgataatgaatgggatacttctgtagatacatggcacaacagagtagcaggagcaagcgagcagggaatctttaaagctgctcagctgacacatacaccatatgacattgtatatctgcaggaggacagcgaacttacagatctgacgaaatatccggtactgttttatgcacatccggttctgatcagtgaagaacgcgtgaaacttctgaaagaatatgttgagcagggcggaacattggttatcggatgccgttcgggttataaagatatgaatggtaaatgtgtgatgcttccacagccggggttgctggcagaacttaccggtacagatgtacgtgattttacatttacaagtcctgcagaagacgaggtatttgcagagtttagcgataagaaaattccaatgccagtatttaatgatattattacaccgctggaaggcacaaaaacactggccgtctatggaaacagctattatgaaggaaatcctgcgcttacctgccatgcagttggcaaaggacaggtattacatctgggggcaactttcaataaggaaaatactgaagcattgtttgattatctgaagattaaagatccatttaaagaatatattgaagctccggaaacagcggaagtgattatgcgtgagaaggatggagagaaatacatttttgtattaaactatcaggctgaaaagattgaatatacacttcagaaaccaatgatcgcactttatgataaaacagaagcaacaggaagatgtacacttcctgcatttggaactgctgtgtataaagtaatagaataaaaagtatttcgagagttaccgaaagaatataaagacagggattgactaaaaactgctatagaaacaagaatgatgtattgggattgttattcaaagaaacatataccaggaaatgtttgatatagcagtttttttgatggattattccccaagtaatttcacataacgtgcctgatgctgaacggccggaagaaatttatttaattcctttcgtatgttgtattattcttttttggtgttttgttttctatatttctgcgggctgcagccctttactctggagaataccttggcatagtagttggagtctgtgaagccggatttctgggcgacttccatgatgctgtcgtcggagctgaggagaaattcaaggctccgttccacccggtattcctgcagaaatgtaaacagggatacgttcatgtatctcttgaataaccggctgcattcgctctcgcagaggtggatttcctctgcgatatctttcatctggattttattcatgtaattgtgttccagataatccatgatctcacgcatacggttgcgttccagtttgctgtgttccgtataggggaggttctccggaagattctgcagcatacagcgccacagcttttgcagagttccggtgatatccagttcgtaaaattcctttttctcttcatacagagttatgatttctctcacatattcggaaaaaatttcatgccagggctgcgaatagtcaatgtagactgcaggaagggagaaattgtgtaaaaatggctccacatatttcctgcgcaggatacttccgtaggaaccatagataatctttggcagaaaagtgatggagacatatttgccgtctttcatatcttccatgaagcctgcgtggagtacattggcatttcccagaaggatatctcctgctttcatgtggtaggtacactggtttactttatagagaatctgtccatccaggacaagggtgatttctatctcaggatgccagtgccagagaaaggagccggatttgtagccggaaagtttctcgtagcttaccagcaaaggaaattcatcactgccatgtttcttcagttctttctgtgagccgtcggttatgatctctgccattatatatgcgtccgttactgaaaacttataaaaagttataaacttctatgttccattcctacttcaacgagtatgcttttgatgatataaatatcaatctactcacaagttcctgtactctccataggcgtaaattccggactaacgtatccgtacatatttgcattaacgtttcagtgtcagcttgcaaatttttctccataagtcttgagatttatagatgcctggaaatctctgtcaatcatattcccacacgcacatctataaactctgtcagataacttcagatcttttttgatgtttccacaacagctgcaaagttttgatgatggataaaaccgatcagccacaataagctggatccctttatcgctgcacctatattcaagctgttttctaaaccaaaaaaatccctgtgcctgaactgctttggataaatgtctgtttttcatcattccgctgacattcagatcttcaatacatataaatcttggttttcgatctacgatctccgatatggtctgatttaaataatttttacggatgtttgttaatctgtgatttcgttttaataaaagtttttcctttttgattacattatttgttttacagtaactttcccctttcttatttttctcgtaagaacgagagatactacgctgtaacctgcgtttctgtttttctgatttctttactttctgactcttattgatgttcttatacttagtcccatcagagcagacagccaggtctttgacccccaggtctatgccgaccccgtcatcattaagtgtttccctgcagtcaggaaattctacacatacgctgatccaccagttcaatccgtcaaaggatattctcgggttcatatatttagcatttgtcggaatacgtccatgttctgcaagtcttacccaattcattttttgtttatttgctttcctgctggaagaaaagccttcaaatttaacgtgtgtattactgaagcgtatcttaacgttgtcctgatagaacttcggcattgatctcttttttgacttgaatcttgggaacttttgcaagcccctgaaaaagttcttataagcagtacaggcatctttgatcgcctgtttggttacattatttgagatattcagtaaccatgcatattcatcagaatgtctaagctttgtaaattcttttctgagttctgcatctgaaaggaattttccgcctttttcatagttttctatttccctggccaaagcccagttataagcaaatcttgaagcacctgcgtactgaaacatcttagttttctgtacattgtttggtatcaacattacttttatggcttttaccatctgtttcctcctgtatcagttcacggataagtttcttagctatattcgctcgttttccttgtaatttacaactgaatactgtgattatctgaaccagatcttcaacaagttcctgctgttcggatttttcagtattatcaatgatctcaatctcacaattataaagtgaagcgatatattctatcagctcaaaaccaaatcgtaatagccggtctttatataaaacaacaaccttttcaacctgattttgagatattcgcctgatcaattcctgaagtccttttttcttataatcaatcccagaaccgatatcacttattatctcaaacggctgtccttttgccagaagataggtcttaacattatcaatctgtcgttccaggtcatctttctgtttatggctggaaacgcggcaatatccaattgtaatgcggtttttaggctttacatttattacctggttgagttgctcatcagaataatatctatagccacttactgtagtatgatgcggatgaagttttccattggcatcccaatttcgtaatgtctgggcagatacgcctataatttttgaaaattcatgtatagaataatatttactcaaagtatcaactcctttcaataatattctaccctaatatcttataaaactcaacatatacttatatgattttataatttatatttaactgttaattccctccattgagaatatatgatgatttttaattatcctatcttatagcaattccggaaaatattgcagacaacctgctgcatcagagaaagaccgttatgcgaaattgctgttgatgacttatataatatattgtacacttatatagatataaacgcaagattttactattttccccttagattatcaaggaattttatgacacagcagggtatactttaattcaagagtgtagctgataaggctgctcccaaactttcatacacatattcccgtctgccgctggttttcacacctgcactgccactgtaaatcgtgaaaattgtcagtacatagtactcataaaactatgtatcagcggtcagaccggaaaaatgaacggaggatttttacaatgaatattccaaataaaaatgaattgacacgtatttacggcgaagcagagaaatcagcagcacgttttcaggctgtagctgatcatttcgcagaaatttaccatcatgatatagcagaattttttacagcaccgggaagaacagagatcatcggaaaccatacagatcataatggcggtcgcgtaatcgcaggcagtattgacatggataccatcggtgcagcttacccgaacaacagcagtgttatccgtatcacaagtgaaggatatgataaggaagttgtcgtagacatcaatgatcttgccagcgtaccgaaggctcagggaaccgtatctctggtagcaggtatggtggaagctattcagaaattcggttttaaagtagccggttttgatgcttatgtgaccacaaatgtaatccgcgcagcaggtgtaagctcttctgcatctttcgaaatgctggtatgttccatcattaattatttctttaatgatggtgcaatgacatacatcaactatgcaaaagcaggacagtatgctgagaatgtttactggctgaaggcttccggattaatggatcagcttgcatgtgcagttggcggaccgatccttctggacttctcagacagagagaatcctaaatatgagaaagtaaacttctctttccatgattatgatcatcatcttgtaatcgttaatacaggaaaaggtcatgctgatttaagtgaagaatactctgagattcctatggaaatgaaagaagcagccaaggcagcaggagcagagcttctctgtgagacaactcttgagaaagtgcttgcaaacatggataagatcgataatgacagagcaatcttaagagcgattcatttcttcaaagagaacgaacgtgtagagagagccgcaaaagcagttgaagagaaagacggtgagactttactgaagctcctcagtgaatccggaaaatcttcctgggaattacttcagaactgctatccgatcaaagcatatacagagcagaagatttctgttgcgcttgctcttacagatctcttccttgagaaactgggcaaaggtatctgccgtatccatggaggcggatttgccggtgttatcatgtgcgtagtgccggaagaagaaacagagaactatgtttcctatatttctgaatttgccggaaaagagaacgtatatccaatgaatatccgcgcagtaggtgcagtacatattgaaaagtaaatatgccgcaaaaggtgttactgaacataaaattatgagcagccagagaagcggattgtgaatatctgtttgacaaatattgagttagatgttatcaggaaaaacaggcagcagtaaggtggattggattgacatacactttactgctgtttttttgttagggcaaagccctgtttgccattgtggagtttttcgctgatccgaaaaacggagctttggaaaacaaataaaccacctgctatgcaggtgagtcagcattgcttcagctttcagaaaaaaacctccggtggtataattaatcctagattattcacgactgtgccgtgaataatctaggataaatatgtgtaggacttgagcgtaatcaagctaaaaaattgatatttgacaaattgtaggttataatgataaaaactgatttttgttgaaaatagtgaatataaatatgctttttgtttatagatgacatcgaagcattttgcagatcattaaagaagaaacaggagactttacagaatgaattaatggggagggatttatatatgtgaatgggaatagggcaatgttaccggtgatatttagaaaatgaagggaaagtaaaaagtgggaaacagaaggactcttttgctataagtcaggcagatattcacaatctccgcaggggaggaaaagtcgcagaaatccaaggaatgtgcatgatctaactttacggtaaaatggtttcatgttatcattatttcatggaattgctataagaaaaaaacgcgcagaaagttgttgcctgactcagagagcggtatacggaagatacccattaacagagtaaatacaggaaaaagaacgggagaggatttcaaatgatagatgtacacaagataagtacaaactgtacaagaaatgaatttgtaggaaccgcagttctggatacgatcgggcttgtgatttcagggattgatgatactttgctggagactatgaacgtaggaatgaagtatcgctgtctgggattgttcagctcccgtacaggtgctgcagggcagatcactgctatcgatgatgcggtgaaagcaaccaacacagaggttctttccatagaattgccgagggataccaagggatggggtggtcatggaaactatattgttcttgggggaactgatgtctcggatgttcgccatgccatatctatagctttggaacttacgaataaatatgcaggtgaactctatatcagcgagagtggacatctggaatttgcctattcagccagtgcaggacaggctctgaataaagcattcggagtaccggttggagaagcctttgggtttatggcgggttctccggctgcaatagggcttgtgatggcagataccgcgatgaaatcagcgcctctttccattgcgaaatatatgacgccgaataagggaaccagccattccaatgaagtgatcctggcagtttccggagatgccagtgctgctaagacagcggtattaaatgccagacagacaggtctggagcttctgatcggaatgggcagttatccggatataccggggatcccgtatttgtagaaataaactttgttgttactgttcacacaccactatcccgcgaggtgttttggcatgaatatgccaaaatcccgagacatacaagccaaaattccattgccgcaggcaatctggaatgaattttggctacgttactgtgaacggagtgaacagtaacgttccctgattcacactgcaggtactgaaaaaatccttgactttttttataacagtccgtataataaccaacggtaaatttaagaaacagatatttggtattattggaaacggtacatcctcctggatggttatgaacaacacaaatctctaattgatgttattcatactatctaaggaggattttatgcctaaaaacaagtttcaggaagttatttttacgattatcatggtgtttgtaatggtttatgccatgatctgctacaacattgtactgaatacagggacaatgacaaatgagacatttctgttagcttttcatgaattaacattcatgggaccgatcgcgtttattcttgatttctttatcatcggtggtcttgcaaagaagattgcatttggtattgtggatatgagaagagataatccgttccaccttgtacttgcaatctcagcagtatccgttgcatttatgtgtccatgtatgagctttgcggcaactgtgctgatcaaacatgcaccggcaagtcagatcattcccacatggctccagacaacagcaatgaactttccgatggcattcttctggcagattttttatgccggaccattcgtaagatttattttcggaaagctttttccggagaaagaaaaggcagcagcttctgccgaataaaaaatatgtaattttgactgcagcattctgtatttcaggatgctgctttttttgtgttcttatctacacaacataaattgtacttattttaatacactattgacaaattctgtcatttcttgtaatatcatataaaacatatcgaataactatgaaaagtagagaatgcaaaaaactactggtaccttaaaggagatgaaacatgatcagaaaattatttgcctttggtcttgcagttgtactggctctgatgccggtacaggcttttggaaaaacggtgtctgtcaccaatgtttcctatgatcctaccagagagatgtttgaacagtataataaaatatttgaagaccactggaaggagaagaccggggaagatgtggaagtgatacagtcccatggcggttcagggaaacaggcacttgaggtagccaatggtctggatgcagatgtggtaaccctggcactggaatatgatattgagtctattgaaaacgcagggctgatcaaggcaggatggaaagataaatttgacaatgacagttctccttatacatccactatcgtatttctggtgaagaaaggaaatcccagggatatcaaagactgggacgatctgacgaaaaaaggagtgggagtagtaacaccaaatccgaaaacctccggtggtgccagatggaactacatagcagcgtgggcttacgcagataaaaagtatggtggcgatgaagcgcagatgaaggaatttattaagaaactttaccggaatgtggtggttcttgactcaggcgcaagaggtgcaacgacctctttcgtggagaacggacaaggagatgtgctggttgcgtgggaaaatgaagcttatctatccatgcgggattatccgaatgagtatgagattgttactccaagcgtaagtattttggcacagccttctgtggcggtggtagatgaagtggtggattacagagatacaagagatgtagcaactgagtatttaaattatctgtattccgacgaagcacaggagatcgcagcagagaattatttccgccccaccaatgagaaaatcctgaagaagcacagtgatacgtttgatctgaatataaatctggcaaatatcaatgattatggcggatgggatgaagtgcagaagaaacatttcacagatggcggaattttcgatcagatttatgagagataaaggaagacaagatgaagcaagagcataagcacagacagaatatatgagacaggagaggtggtaattgattatgaaaaaaagaaataaaccggtgattccagggtttgggctctccatgggaattaccatttccatattgagtctggtagttctgatccccctggcaagcctggtggtctacacagcgaagctgagttttaaagattttatcgaaaccatcacaagggccagagtgctggcatccttttataccagttttgtatgtgcttttgcagcagcagtaataaatggaattatgggaactattcttgcgtgggtgcttgtgaaatatgattttccgggcaagagacttatggatggggtgatcgaacttccctttgctcttcccacagcggtagcaggtattgcactgacatccctgacctcagattcgggaattgtcggcagcttttttgcaggattcggtatcaagatcgcatacacaagaataggtattacagtggctatgatatttgtaggaataccgttcgttgtgcgaagtgtacagccggttctggaaaagatggataattcttacagcgaggcagcaggagtgctgggagcaaagaaaacaactatcttctggaaggtcatttttccggaactgaagcccgcgatctttgcagggaccggacttgcgttcggaagatgtctgggtgaatatggaagtgttgtatttatcgcaggaaataaaccctattatacagaaatcacaccgctggttattatgtcaaagcttcaggaatttgattattcaagtgcaacggcaatcgcacttgtgatgttggcagtttcatttttcattctgtttcttaacagtatgatacagcagagaaatgcaagaattttaagaggaggaaatgcctgatggacaacaatgaaaagacttcggagaaaattacaaaatggctgcttgtcgggatcagtgttctgtttctggcagtcatgctccttcttcctctgatcactgtgatcacagaagcattgcggagcggatggaaggtctatgcagctgcagtgacagatgagtacaccatcaaagcacttcttcttacagtgaaggcaacactctttgcagttgtttttaacactgtttttggtgtttttgcagcctgggcactgacgaagtttcagttcaggggtaaaaagcttctcactaccctgatcgaccttccggttactatttcccctgttattgcaggtttgatctttcttctgattttcggacgacagagtcctgtttacttttttctcatgaagttagggattaaagttgtattctctgtaccgggaatcattattgcaactgtatttgtaacctttccttttatttccagagaactgattccggttctggaagcagaaggaagcgatgaggaggaagcggcagccctgatgggagcaggtggatggaccattttctggaagatcacattccctcatatcaaatgggcattactgtatggagttgtgctctgtacggcaagagcaatgggagagtttggagcggtatctgtactttccggacatttaagaggaaagaccaatacacttcctcttcatgtagagattttgtttaatgagtttcagtatgttccggcatttgccgtatcttcactgcttgtgatcatggcagttatcattctggtagtcagaagcctgattgaatataaaggaaagaaggaagcctgatatgtatgtagagttaaaaaatatcaataagacatatggttcttaccaggcatcaaggaatgtgaatctcggaattgagaaaggtaaactgattggtctgttgggaccaagcggaagcggaaaaacaactattcttcgaatgatcgcaggtctggaaaccccggacagcggagaggtaattattgatggaaaagtggtaaatgatgttccggccagtcagcgtgggattggatttgtatttcagaattatgcgttgtttcgctatatgacagtttatgacaacgttgcatttggtttgaaggttcagaaggctgataagaagaaaattgatgccagagtcagagagctgatcaaactggtggggctggaaggactggaaaaaagatatccaagccagttatccggcggccagaggcaaagggtggcatttgccagagcccttgctccaaatccccaggtgctgcttctggatgagccctttgcagccattgatgcaaaaatccgtcaggaactgcgaagctggttaaaagagatgatcgggaaactgggaattaccagtattttcgttactcatgatcaggatgaggccattgaagtagcagatgagattattatcactaatgcaggacggatcgaacagaaaggaactcccataggggtttacagaaatcctgagacagcttttacagcgtccttcttcggacagccatctgtgttgaaaaatgcggatgatttccatacctttgctcaggcagaaggagcagacaagatcattgtccgcccggaatttgtaaaaatctccaaactggatgaggtggagaagttcaaaacttccgtatcccggggagtggttgaacgggtttctttcaggggagataatctggaacttcaggtgagagtcaacaattccgtagtaactgccagaagaagcctggagaaagcagatatccgggaaggtgagactgtgaatgtattcctttacaggatttttgcactgagaggtgacagtgtacagctgatcgaaaatgaggctgtaagggatgactttgtaattatctgacaacggtggctgcggcgactgacgacaatgaagaaataagaaattcagaggcaagactgatcggaaaatcaacttgttggcacactggtatggaggaaagggtaagagagaatgagaacagagagaatcaggacagatgtgctgatcatcggcggcggtacggcaggatgctttgcagcctatgtgatcggcaaaaaaagcggcagaaaagttctgatcgcagagaaagcgaatattaagcgaagcggatgtctggcggcgggcgtgaatgcattgaacgcatatattacagaaggcagagtgccgcaggattatgtggattatgccaaaaaggatgcccatggaatcgtaagagaagaccttcttcttaccatgtcagagagactgaatcatgtgacaaaggtgatggaagatctggggctggtcatcctgaaggacgaaaacggaaaatatgttgccagaggaaaccgaaacatcaagatcaatggcgaaaatatgaagccaatccttgcaaaggcggcagctgaacaggagaatgttacggttctcaatcatgtaaatattacagattataaaacagaaaacaaaaaagtcacaggcgcagttggatttagcgttaatgaggatattttctatgacattgatgcgaaagcagttctttgtgccacaggtggtgcagcgggactttacagaccgaataatccgggattttccagacataagatgtggtatcctccgtttaacacaggtgcaggatatgcaatgggacttctttccggtgcggagatgacaacctttgagatgcgtttcattgcattgagatgtaaggacacgattgctcctacaggaactattgctcagggtgttggggccagacaggtcaatgcacatggtgatatttatgaaacaaaatatggtctgacaacttcccagcgagtttacggtacagtcatggagaacagagaaggaaacggtccatgttatctcagaacggaaggtatttccaaagaacaggagcaggacctttacaaagcttacctgaatatggcaccatcccagactctgaaatggatggaagccggaaaaggaccatccgaagagaatgtagagattgaaggcacagagccatatattgtaggcggacatacagccagcggttactgggtagataataacagagctacaactattgaaggtttatatgcagccggagacgtagcaggaggatgtccgcagaaatatgtaaccggtgcactggcagaaggtgagatcgcagcagaggcgattttggaatatctgaatggcaaagatgatgactggatcgcagcggaaaataaggaagaggctttagagcgtggcggagaacaggagctgtctcaaactgcaatagctaagaaggcagaatacgaatcacatttgaatgcttcccgttctttgatgaatgcagagcagcttgaggaagccatgcagaagatcatggatcagtatgcaggaggaatcggtacagactacagatacagcgggatgagtcttgcaaaggcagatgaaaagattgcagcattgttgccagtagttgacactttggcagcaacagatacttatgaactgatgcagatttatgaacttcgcgaacgactgatcgtgtgccaggcagtgatcgcacatctggcagccagaaaggaaaccagatggcatagtttcggagagaatacagactacccgcagcagagcgaagagtggatgaaatatgtaaactcccgtatggaaaacggcgagattaagatcttatatcgtgacctgattacaaaggaaaatacaggtttgaatacagcagagagaggagcaggtgagagatgagcattcggattcagaaaagtaaatgtgcaggatgcggcagatgtatcgaagcctgtcccggaaatctgatcaaaaaggataaagagaacaaagcctttatccggcaggtaagagactgctggggatgtacttcctgtattaaggaatgcaggcatgatgccatccgctttttccttggagctgatgtgggaggcagaggtgcaagtatggttgtatcagagaaaccggatatttccacatggacagtggagaagccggatggcactaaaatcactattcaggttaataagaaagacgctaataaatattaaacataagtatgtactctcagagtctttagagtgtgtttgaaaaatgctttacgcaagatgtgcgtcacaatttatgggagattttgttcggatgagggcgtcgtagcgggctacgacaaccgaattcggacaaaatataccgcaaagtggggcgtgcagattgcgggaatgatttttcagacacgctctagtgtatttgctcaagtacgaaaagattccgagtataaacaaacagaggaggataatgcaatgagtaacttatctcatcttgatgcgcttgaggcagaggcgatttatattatgcgagaagtagcagccgagtgtgaaaagccggttatgctctattctataggaaaggacagctccgttatgctccatctggcgatgaaggcattttacccggagaaaccgccattcccgttccttcacattgatactacatggaaattccatgagatgattgaattccgcgacagaatcgcaaaggaaaacggaattgatatgctggtttacaccaatgaagagggtgtaaaggcaggaatcaatccatttgacaatggttctgcatatacagatatcatgaaaacacaggcgttaaaacaggctctgaccaaatatggatttacagcggcatttggaggcggccgccgtgacgaggagaaatccagagcaaaagagagaatcttttctttccgtaattcagctcaggcatgggatccgaaaaaccagagaccggagatgtggaagctttataacactaagatccagaagggagagagtatgcgagtattcccaatttccaactggacagaaaaggatatctggcagtacattcagcgtgaaaatatcgaaattgtaccgttatattttgcgaaagaaagaccggtcatctacagagaaggaaatatcattatggtggatgatgacagattaaaactccgtccgggtgaaaagattgaaaacaaaaaagtcagattccgtactcttggatgctatccgcttactggaggtattgaatctgaagcagatactctggatgagattattgatgagacgttaagtgctgtttcttctgaacgtaccagcagggtgatcgaccacgaggcagcaggcagcatggagagaagaaagagagaggggtatttctagaatgaaaggattattgaaatttattacatgcggaagtgtggatgatggaaaatccactctgatcggacatattctttatgatgcaaagcttctctatgcagatcaggagaaagccctggagctggattccaaagtaggaagcagaggcggtgccattgattattctcttcttctggacggtctgatggcagagcgtgaacagggaatcaccattgatgttgcataccgttattttacaacagataacagaagcttcattgttgcagatacacccggacatgaagaatatacaagaaacatggcagtgggtgcgtcctttgcagatctggcagttatcctggtggatgcttcacagggagtattggtacagacaagacgtcatgcaagaatctgcgcattgatgggaatccgttactttgtatttgcagtaaacaaaatggatcttattgaatatgatgaaaaacgtttccgcgacattgagaatcagatcgcagcactgatagaagaactgaaacttgccaatgtaactattattccggtatctgctacagaaggtgacaacgttacaaccaaatctgacaacatgccatggtataaaggtgaggcgcttctttcccatctggaaaccgtagacattaaggaagatacagagaagggcttctatatgcctgtacagagagtctgcagaccaaaccatgagtttcgcggattccagggacagattgaaaatggtgccatcagggcaggcgaccttgtgactactcttcccagtaaagaagaagctcatgtaaagagtattcttgttggcgataaagaagttcaggaagccgtacagggacagcctgttaccatccagcttgacagagaagtagatgtttcccgcggatgtgtacttaccattgattccggcgcagttcttacagactctgtggaagcagatatcctctggatggatgacaatgctcttacggatggcaagaacttctttgtaaaaatcggtacaaagatgatccccggcctggttacaaagatcaattattctgtggatgttaacacaggtgagaagaaaagcgcatataccttaaagaaaaatgagattgcttcctgtactctggaattctcagagaaaatcgttgtggacgaatttgacaggcacagaacactgggtgagctgatcctgatagatcgtgtcacaaatatgacttctgcctgcggtgttgtgagaaaaacctttgtttctcaggatagatcccagatcggaaaagtggatgagcaggttcgtgcaggactgaaaggtcagacaccggtagtagtggaattcccgatcggtaaagaaggaatcactcttgattttgcagagcaggtagaaaagggactgactgtacttggaaaacatacctatctgtatcatccggcagcgagtgaaaactatgcagaaactgtccgccatcttaaggcagcaggtctgatcgtacttcttgttcttgatgaaaatacagcaaaagacgagacattaaagactctggatggtttctatgcgaactggcagattgacggaattactgtgaaagatgcgattgatttcgtgaaaaagaaatctgcatttacagtgcagagtgtacaagatggaaattatatctgattataacagggctataaatcgccgcagagacaaagaaagtctctgcggtattttgttttcttgacaagtgtcgttacagcggattatacttattctcaaatattcagaatccataataatacagacaggaaagataacagaaatatgcaaacgaacaatgaaagtaaacaaaaccaaaaaaagagatgatgcttggaactttgtttgtaattgctacgatcatcatcctggcgataccaacgaagaaaagacagaaataaagatgagtgaatatcgatcagaatgtagaatgggcaattggttactgttcacacaccattatcccgcgaggtgttttggcatgaatatgccaaaatcccgagacatacaagccaaaattccattgccacaggcaatctgaaatgaattttggctaagttactgtaaacggagtgaacagtaacggcaattgtgaagtggcattcagattacatattatgcagcagagtatgatataatccattttgtataatggcgtcaggattaagagcatatgtagagctgtgtagcgaagcggattgcgaatatctgtttgacttttgatgggtgtacacgagaacatttttttacagtgaaagttatctgtattatattacagagggtactgtacagataatcaggaggtattttatgcgtttggaaaaagtacaggaagcgttaaaaacaaagaaaattcattatgaatatacagaggaaaatggatgcggaagcatcgactttatgtttcgcggtctgagattccatatatgggaatatgaagatcgtgtctggggagcggagacaaacgtgttcgaagcaggcagaagccaggatattgaaggagattacgaggaaattatttccggagaaatcctctcatggccggatatgctgcctgggatgtaagtattactgcagaagggaatgatatttacgaaaaaatatagaaccggacaaattgtattaactgcatgtattgtagctgtctgtatgttttcaaatgtctatgggacagaagcggcaggtccgccggcaccgaaaactctgacagttacaccgacagaaaaaccgaaatcaacagcaaagtcaaagtctgcgtcaacatcaaagtccaaatcaacaccgaaatccaaatcggcactaacacaaaaacctgaagcaacaccaatacctgcatctactccaacaccagagcaggaagctgagacagataaacagaatccggcagatcagggaactttaagcaagccagatcatccggatactatctccgcagataaactggtatttatcggagattccagaacagagggattgagggatgcggtaaatgatgacagcatttggtcctgtctttcttctatgggatatgactggatggtatctacaggagtgcctcaggtagaagatcagattgaggacaatacagcggttattattctgatgggtgttaatgacctgtatcatgttaatgactacgttagctatattaattccaaagctgccgaatggggaaacaggggagcgcagacttattttgtgtctgtaggtccggtgcagaatgatccctattgcagtaatgcggagattgaaagtttcaatgcggcaatgcaggcaaatctgagcggggttacctacatagacgtatattcccatctggtatctgagggattttccaccgtagacggaacccactatccggacagtgtgtctgtagatatttataattatattctggatcatctggaggaacagaggagtggaatctggggatgattttttagtttatgaaattgtgatgctgtattgagttcgatggagtttggtgatatgattgcagaggaaaaaacgaaatagagcggaaattcgtttttatataaaagctgaaaacctggtaggaggaaataatgagtggctgttttgcagcagagccaaaaatgtaaatgataattgcccgatgactggacagttatcaaaatccaaaatcaggaggaaagaatgagaggactgtattcatccaaaacagaaatcagacacaaaatttttacggaaattgcgaggatggcatatgaaggccagtctccggagatgctggaagagcttccctacaagattgtacccggtgaaattgcgacttatcgtgacagtatttttctggaaagagcggtagttggtgagagacttcgcgttgcaatggggatgtcactgagaaaggttacagagcatgcgccaatctcaaaaggtgtggaagccagcgttattgaggaaaagtattatgaaccgccgcttatcaatgtaatcaagtttgcctgtaattcctgccctgagaaaagggtaatgatcacagagggctgtcagggctgtctggagcatccctgtgtggaggtctgtccaaagaaagcagtacatatggaaggcggcagatcacatattgatgaagatgcctgcatcaaatgcggaaagtgtctggaagcctgtccgtataatgcaatcatcaaacaggaacgtccctgttcaaaggcctgcggcatgaatgccattggttctgacgaatacggaagagcggagattgatcaggacaaatgtgtatcctgcggacagtgtctggtgagctgtccgttcagcgctattgtagacaaaggacagattttccagactgttatggcattaaaaagtgaaacaccggtgtatgcaatcgtggcgcctgccattgcaggtcagttcccaggtatggagaataataagatacggggtgcatttcaggcacttggctttacagatgtaagagaggttgcagtcggtgcagatttgtgcacagtggaggaggcaaaggactttttggaggaagttcctgagaaacttccgtttatggctacatcctgttgtccgtcctggtctatgatggctaagaaattattcccggaacaggcgaaatgtatctccatggcactgacacctatggttcttactgccagactgatcaagcagaaggaaccgaattgtaagatagttttcgtaggtccctgtgcagccaagaagctggaagccagccgtaagagtatccgcagctatgtggattttgtgctgacctttgaggaagtggcaggaatgtttgatgccaaaggcgtggactggaaagatattccggaaggagagccactgtttcgtgccagtgctgacggaagaggtttcgcagtcagcggtggtgtggcagaagcggttgtccatgcggtgaagcgtattgatcctgatcgggaagtaaaggtaatgaatgcagaaggtctgcagaactgtaagaagatgctccagatggccaagattggtaaatataatggatatctgctggaaggaatggcatgtccgggcggctgtgtagcaggtgccggtactatccagacagttaaaaaagcagcagcggctctcgaaaaaatgaagaaagaggcttcgtttacagatgcctatgactccaaatacagagcaagactggaaagtctggagaaatttgatgtggagtgagattctgactgaatcagtgaaatcctatatggattgcaagtgtttgaatgcaatcagtatatagcagactaaaaatgaataatcatcagaagaactgtcaggctgagtgataagtttaactgaatcggataagtcccctgcggaggttgcgaaaagcaataagcaggggacttttgtcatctgtacaaggttgacttaagtcaaaacaccagttaataattgttgatttatatttctgttttttcaatttaagtcatcagagacagatttattctgtttccgtaactttgatttttttctggaaatctctggtatagtgaatctcataatcagaagttacgaaaaatgcctgtacatcgtccagagactcggccagtttcatgccatcctccagaccaagagcaaagcaggtcgtgctcagcgcatccccgtccacagactgatcggaaataatggtaactgcaatcagcccgttatcataaggatagccggttttaggattgagcaggtgatgatacaaagtgccatcctgttcaaagcatctctcataaattcctgaggaaaccactgacttatccctgatgtccataacagcaatagtttcgcttcggtctgcaaatggtttctggatcccgatcttaaaagcagaattgtctgttttttcgccaatacagagaacatttccgccaagattgatgatcgcactttttacattctgagaaaccagataatccttcaggcggtctgcgatataacccttggcaatggcacctagttcgattgcagtatcgtctgtctttaatgtaatctcatttttatctgtatcaacagagatattgtgataattgcatttgggcagtgctgcctggatcagactgtccttgggcacttttggattttcagcagtaaaatcccacagagaagtcagcggttcaatagcaatatcaaatgcaccctcagataatacagaataatcaagtcccttagaaaccagctccgccagagaagccgacacctgataagtattctctgtccccttcacaggtgtaagttcccgatggtttaactgatataattcactgtcatctgcggtgcggctgaatattttctcatacttgtcacaaagattcatgcattctgtaagcagctctctgtcctgagaatcatagatagtgaccgtaactgcagtattcagtttgatcgcagtggcagagatgggatcctgggaaccggcatccgtatttttgacattttccgtttttgccgaacatccggaaaaaacagccggacataatataagagatgctgcgagcattgaaaaagtacagcgtgttattaatttttttgcagatatatgatataatatcataaatgtaacctcatagttattttatggaattgctataagcaatagttcagggaagaaatatcttttgatcccaacaccatagtatatcagaaacagcaaactttgcacaggtacaaaggcaacagaaaaaatccaaaaggagataccggatagaaatgaaatatgccggaaacaaagagaggagtaaataatgtccgatgcagtaaactgcgaatattgtgtaaactacagttatgatgacgactatgaatgctacacctgtgaaataaatcttgacgaagatgaaatggtgaagttcatcaccggaaacttcaatcagtgtccatacttcaagatgggtgacgaataccgcattgtacgtaagcagatgtagaatttataaaaagtaacaaatattcaactaagcgaggaattaagataatggaaaacgtttatattatgaatcatccgctgatccagcataaaatatccatgctgagaaacaaaaacacaggaacaaatgaatttcgtaaattagtagaagagattggaatcctcatgggatacgaagctctccgggatcttcctgtagaaaatgtagaagtagaaacccctattgaaacctgcatgacaccaatgatttcagggaaaaaactggcggttatccctgtgctccgagcaggccttggaatggtaaacagtattctcacacttgtgccatctgcaaaagtaggccatgtaggactctatcgtgatcctgtaacccatgaaccacacgaatactactgcaaactcccggaagcaattgatgagcgaatttcagtgatcgtagatccaatgctcgcaaccggtggctccgcagaagcagccgttgactttgtcaaaaagcagggcggaaaaaacattaaattcatgtgcatcatcgcagcccctgaaggactcagacgtctccacgaagcacatccggatgttcagatttactgtggacatcttgatcgtgaattaaatgatcacgcctacatctgcccaggccttggagatgccggagaccgtatcttcggaacaatgtaagaacaacgtgatttgttacatctcatacctatactgcgcatatgaagaaatcaccctgcatcaatatagcagaaatttgttttagatatactgataattttccaactaccagcgtaagcaggattctcttttggggtgaatcttgtagggagtgtagcaactcttaggcctgcggaatctgcgttatgaaaaaagaaggcaactgtctgagccgcaggcgagttttgccttcttttttcatgcacttagcagattttgcaggccttagagttcctgctcccgaaactgaaccccaaaagagaatcctgcttacgcgtcccttaatgaaaaaatcaacaaaaaaccgaaaaaacctcttgacaacccaaatctcatatgctatcttataccagaacgctgccgaagacagtaggtgccgcaaggcataagttgtaaacgcctaccgaggactaagtattctttatatttttatgtaagattacgcaagccctactgccagacagtaaggctttttatttactcatttgcagcggtatacaaaatctataaggaggtgtaccatttcatggcaaaagtagaacttaaacaaccaatcgtagacgaaatcatcaacaacgtgaaagatgcagaatctgtagtacttgttaactacagcggtcttacagttgaacaggatactgctttacgtaaggaattaagagaagctggtgttgtatacaaagtatacaaaaacacaatgatgcatcgtgcattcgaaggtactcagtgcgaagaacttatccagcacttacatggaacaaacgctatagcaatctctgctacagacgcaactgctcctgcaagaatccttgataaattcgcaaagaaagcaccggctttagaattagttgcaggtatcgttgaaggaaactacaacgatcaggcaggtattcaggcactggctggaatcccgtccagagaagaacttctcggcaaactgcttggaagcatccagtctccgattacaaacttcgctcgtgtgcttaatcagatcgctgagaaaaacggctctgaagcagcagctgaataatttttgatgccagaggcataaaacgaatctagtaactattcgaaaatcaccatccacgaggatgctgaagagttaccgaattaaataatattatatggagggaatttaaaatggcaaaattaacaacagaagaatttattgcagcaatcaaagaattatctgtattagaattaaacgacttagtaaaagcttgtgaagaagagtttggtgtatccgcagcagcaggtgttgtagtagcagcagctggagcagcagaagcagcagaagagaaagatgagttcgatgtagaacttgcagaagttggaccaaacaaagttaaagttatcaaagttgttcgtgaagtaactggcttaggtcttaaagaagctaaagaaatggttgacggagctcctaaggttgttaaagaaggcgcatccaaagcagaagctgaagatatcaaaacaaaacttgaagctgaaggcgctaaggttaaccttaaataattatcttcctattatatatagaagatttgcaagcaggaatgccactggtattcctgctttttttacagagccggaggattacagactatgatgaaaagaaaaacggcagtcatatttggtatcatcattgcagcccagctttgtctgactccatatgcaggtgtaaaagtacaggcggctgaactggaagaaggacagatgtttgaagattcatcagaagattcagagacttttggagatgtgtcaataccggatacgcagtcggcagagaaaactgaagagaatgaatttggggatgacgacggtttcagtgatggagacgttgaaactttttcggcggaggatgcggatcagtcctgcgaaaatatgcaggaacttgtgctgaatgtgcaggatggagaggatattactgtaaagttaaatacactgctggcacaggccagggacagggcaacagatgaaaagcagtgcaaagttatcgtgccgcccggaaattatacacttacgggagctttgcatatgtacagcaatatctatctatatgcagagggtgccacgataacaaagacttcaccgcgaaaagaaatcctgctccgtcttggcgatacacagaaatctgcaggcggatacgagggatatcgtaatataactatcgatggcggaacctgggattcaaactatgaatgtgtggaagacaagggaggacctggagggtttgtaggttttagaatcggtcatgctacgaatgttacagtgaagaatgttacatttcttaataaccttaaatcgcattttctggaacttgcaggagtgaagaatgcagaaattacaggatgtacgttcaggggctactggaaagagtttacaggcggcggacaggaatgtatccagctggatgcctgtatgccgagaattttcccaggatatcttccatatgacggaagtgtctgtgagaacattgtgataaaggataatacctttgaagatgtatttgccggcattggaagccacagcatgatgtttgataaaccgtataaaaatatcacgatcagtaacaaccggtttaataatctgaaaaagagagcaatatggtgcctgaattatcaggatacggttgtgacgggaaataccatgacaaatgtgggtggtggtgtttatgtgcgttctgtttataccagaaatgcacatactgtcagcggtcaggaagtatctccggagggaaatcagtacgcagagaatattctgatcgctgataatcagatcacagttctggaaccaaccgtaatagatggcaaacaatggaatggatatggaatctggatcacaggcgaggtatctctgggctcagcaggagaaactattccttctgaagatgatgatcctgagaatacagcaaatccgacgaccaatggaattccggcgggaagatatattattcgcggagttacagccagaaataatacgatcagcggaaattgcgacggaattaaattttcccttgcagaagactgttcatgcagggggaacacagtcagactttctgatagtcatacctacaacaatatgggaatcagtgttgccaagggaagcaatatcagagtttcctataacaatctttccggcggaaacggatatgggatttatgcagtcggaacagaggcttcacagaaaatctgccggatttacggaaatacagtctccggatttatgaaagatgggattctggcttcagggcttgcagcaggaagccgtattgaacacaacagagtcagtaccagtgcggcaaatggcatacttgtaaaatgtattgataagagtgtggttgatggcaattacagttttaaaaataaggcaagaggaattcttctgcagagatgtgagtcagcaatggtagcggataattttgtttctgaaaatgcgatcaatggaattgaactcaatataagaagcaatcattcttctgtgcagggaaatatctgtggttccaataaaaaatcaggtctgcgcattgccggatcaaaggggatttcggcagacggaaattccttccgcagcaacagaggatatgcggcagaatttatcagttcccatatcagcagttataaaggcaatcgttttgaaaaaaatggatattcaaatcgtatccatgtaagaaatagtaaaatcccgaagaaatagcgactgctgtaattatttgaaaaaattaaaaaagtatcaaaaaagtgattgacaggcgcaacttgctgtgctatagtgaagaatgctatattatggcaagatgtgcctttatgtcttttggcaaaaagggtcaagttataataaatttaaagaaaaaacaggggtgaaacgtcaatggaaaaaaacagaattcgttctgtaaaaactggaaaaagcatgcgtatgagctaccagagacaagaagaagtcctggaaatgccaaacctgatcgaagtccagagggattcttataaatggtttcttgatgaaggacttagggaagtctttgatgatatttctccgatcgcggactacagcggaaagctcagcctggaattcatcgactttacatttgacgagaaggatgcgaaatatactatcgaacagtgtaaagaacgtgacgcaacttacgccgcacctttgaaggttcgagtgagactgattaacaaagaaacagaggaaatcaacgaacacgagattttcatgggagatttaccgatcatgactgttacaggtacctttgtcatcaatggtgcagagcgagtaattgtcagccagttagtacgttcccctggaatctattacgcaatcgcgcatgataaacttggtaagagactgttctccagtactgtaatcccgaacagaggtgcatggctggaatatgagacagactctaatgatgttttctatgtacgtgttgacagaacaagaaaggttccgatcactgttctgatccgagcacttggtgtaggaagcaatgcagagattattgatctcttcggtgaagagccaaagatccttgcaagttttacaaaggatacatccaccaactatcaggaaggtcttcttgaattatacaagaaaatccgtccgggtgagccgcttgcagttgagagtgcggagagccttatcaatgcaatgttctttgatccgagaagatatgaccttgcgaaagttggacgttataaatttaacaagaagctccacctcaacagaagaatcgttggtcacagactggctgaggatgttgttgatgcttctacaggcgaaatcctggcagaagaaggaactgttgtgacaaaagaaatggcaaataccatccagaacagcgctgttccatatgtatggatccttggcgaggaagaccgcagaatcaaggttctttctaacttaatggttgatatccgccactatcttccggaaatcgaagatccaaagagcatcggtgttacagaagcagtatactaccctgttctcgaaaacattctggaagaaaatgagacattagaagacaggattgcagcaatccacagagatatccatgatctgattccgaagcatatcacaaaagaagacatctttgcttctattaactacaatatgcatctggaatatggccttggtaatgccgatgatatcgaccacttgggcaaccgtcgtatccgtgcggtaggtgagctgcttcagaaccagtacagaatcggtctttccagactggaacgtgtggttcgtgagagaatgacaactcaggatacagagaatatttctccacagtccctgatcaatattaaacctgtaactgcagcagtgaaagagttcttcggttcttcccagctgtcacagtttatggatcagaacaaccctcttggtgagctgacacacaagagacgtctttccgccctgggacctggcggtctgtcacgagacagagccggattcgaggttcgagatgtccattactcccattacggaagaatgtgccctgtcgagacacctgaaggtcctaacatcggtctgatcaactctcttgcatcttatgcaagaatcaatcagtacggatttattgaggcaccataccgcaagatcgacaaagcagatcctaagaatcctcgtgtaacagatgaggttgtatatatgactgctgatgaagaggataattaccatgtagcacaggcgaatgagcctctggacgaagaaggacatttcattcataagaatgtatccggtcgtttccgtgaagagactcaggagtatgagcgtcatatgtttgattacatggacgtatctcctcgtatggtattctccgtcgctactgccctgatcccgttcctgcagaacgacgatgccaaccgtgcgctgatgggatcaaacatgcagcgtcaggctgtgccgcttctgacaacagaggctccggcagttggtactggtatggaagtgaagacagcagttgactccggtgtctgcgtagttgcaaagaaatccggtactgtacttcgttccacatctacagatatcagcattaagaatgatgatggtacaaaagaagattaccatctgactaaatacttaagaagtaaccagagtaactgctataatcagaaaccgatcgtattccagggtgagcacgtagaggcaggacaggttatcgcagatggtccttccacagcaaacggagaacttgctcttggtaagaacccgctgatcggattcatgacatgggaaggttataactacgaggatgcggtactcctcagtgaaagacttgttatggacgatgtttatacatctgttcatattgaagaatatgaatgtgaagcccgtgataccaaactgggaccggaagaaatcacacgtgatgttcctggcgtgggcgacgatgcactgaaagatctggatgagcgtggtattatccgtatcggtgctgaagtacgtgctggcgatatccttgttggtaaagttactcctaagggagagacagagcttactgcagaagagagacttcttcgtgcgatctttggtgagaaagcacgtgaagtacgtgatacttctctgaaagtacctcacggtgaatacggtattatcgtagatgctaaggtatttacaagagagaacggcgatgagatgtcacctggtgttaaccagtccgtacgtatctacatcgcacagaagagaaagatttccgttggtgataagatggccggacgtcatggtaacaagggtgttgtttcccgtgtacttcctgttgaagatatgccattccttccgaacggacgtcctcttgatatcgtgctgaaccctctgggtgtgccttcccgaatgaatatcggacaggtcctggagattcacttaagccttgctgcgaaagcacttggattcaacgttgcaactcctattttccagggtgcaaacgagcatgatatccaggatacactggaacttgcaaacgactatgtaaacacagaagactttgaagagttccgcgagaaatacaaagacattttagcaccggatgtaatgcagtatctggatgagaacaaagcccacagagcactgtggaagggtgttccgatttccagagacggtaaagtgcgtctgcgtgacggccgtacaggagagtatttcgacagtcctgtaacaattggtcacatgcactatctgaaactgcaccatctggttgatgataagatccatgcacgttctacaggtccttactctctggtaacacagcagccactgggtggtaaagcacagttcggtggacagcgttttggtgagatggaggtttgggcactggaagcatacggtgcatcttacacactgcaggaaatcctgacagtaaaatccgatgatgttgttggtcgtgttaagacatacgaagcaatcatcaagggtgacaatattcctgagccgggtattccggaatccttcaaggttctcttaaaagaacttcagtctcttggtctggatgtgaaggtactcaaggatgacaatacagaagtacatcttcttgaatctgtagattacggtgacacagaccttcgttctgtcatcgagggagattccagaagacatcatgacagagaagaagactacggcaaacatggctatacaaagcaggagtttgacggagaagaactcgttgacattgatgaggatgaagatgaggatgacttcattgagctggatgaggctcttgaagacaatgacgaagagtaagaaaggggaaagaatacatggcagaaacaactaacgccaatgaaacatatcagccaatgactttcgatgccatcaaaatcggactggcgtcccctgagaaaatcagagagtggtcaagaggcgaggttttaaaacctgagaccatcaactaccgtaccttaaagccggagaaagacggacttttctgtgaaagaatctttggaccgagcaaggactgggagtgccactgtggaaagtacaaaaagattcgctataaaggcgttgtctgcgacagatgtggtgtagaagttaccaaatcctctgtacgtagagagcgtatgggacatatcgagctggctgctccggtatcccacatctggtatttcaaaggaattccgtcccgtatgggactgatccttgacatttctccgagaactctggagaaagtcctttactttgctaactatatcgtactggatccggctaattccggactccagtacaaacaggtacttacagagagagaatatcaggatgcacgtgaggcttatggatatgatttccgtgtaggtatgggtgcagaatccatcaaagagctccttgaggcaattgatcttgagaaagattctattgaactgaaaaaagaattaaaagatgctacaggccagaaacgtgccagaatcatcaaacgtctggaagttgtagaatccttccgcgagtcaggaaaccgtcctgagtggatgatcatgacagtgatccctgtaatcccgccggatcttcgtcctatggttcagctggatggcggacgttttgctacatctgacttaaatgatctttacagaagaatcatcaaccgtaacaaccgtctgaagagacttctggaattaggtgcaccggatattatcgttcgtaacgagaaacgtatgcttcaggaagctgttgatgccctgatcgacaacggtcgtcgcggacgccctgtaacaggtcctggaaacagagccctgaaatccctttctgatatgctgaaaggtaaatccggacgtttccgtcagaaccttctcggtaaacgagttgactattccggacgttccgttatcgtcgtaggaccggaacttaagatttaccagtgtggtcttccgaaagagatggcgatcgagctgttcaaacctttcgttatgaaagagcttgttgccaacggaacttcacacaatattaagaacgccaagaaaatggttgagaagctggagccagctgtatgggatgttctggaggatgttatcaaagaacatccggttatgctgaaccgagcacctacactgcatcgtcttggtatccaggcattcgaaccgatccttgtagaaggtaaagcgatcaaactgcatccgctggtttgtaccgcattcaacgctgacttcgatggtgaccagatggccgtacatcttccgctttcacaggaagcacaggcagagtgccgtttccttctgttatcaccgaacaacctgctgaaaccttctgatggtggtcctgtagccgttccttcacaggatatggtacttggtatctactatctgactcaggaaagacctggaaacaagggtgaaggcaagttctttaagagcgtaaacgaagcaatccttgcttatgagaataaagtaatcacactgcagtccagaatccatgttcgctgcagcaagacaatgccggacggatccgttctgaccggtacagtagagtctacacttggacgtttcctgtttaacgaaatccttccacaggatcttggtttcgtagacagaagtgttccgggaaatgaacttcttcttgaggttgacttcctggtagccaagaaacagctgaaacagattcttgaaaaagttatcaatactcacggtgctacaaagactgctgaggttcttgatgcgatcaaagctacaggttacaaatattccacacgtgcagccatgactgttgccattgccgatatgacagttccgcctcagaaaccggaaatgatcaaacaggctcaggatactgtagaccttatcacaaagaactataaacgtggtcttatcaccgaggaagagcgttacaaagaagttgttgatacatggaagaagactgacgatgagcttacacatgctctgctgacaggtcttgataaatacaacaacatcttcatgatggctgactccggtgcccgtggttccgataaacagatcaaacagcttgcaggtatgcgaggactgatggccgatacaaccggtcacaccatcgagctgcctatcaagtcaaacttccgtgaaggtcttgacgtactggaatacttcatgtctgcacatggagcacgtaaaggtatgtccgatacagctcttcgtacagccgattcaggttacctgacaagacgtatggttgacgtttctcaggatctgatcgtacgtgagacagactgctgtgaaaacagagatgagatctcaggtatgtatgtagaatcttttgtagatggtaaagaagagatcgaaggacttcaggagcgtatcacaggtcgtttctcctgtgagacaattaagaataaagatggcgaagttatcgtaaaagccaaccatatgatcacaccgaaacgtgctgcccgcatcatgaaagaaggcgtggacaaccagacaggcggatctatcgagaaagttaagatccgtacaatccttacatgtaaatgtaaagttggtatctgtgcgaaatgttacggtgcgaaccttgcaaccggcgagccggtacaggttggtgaatctgtcggtatcatcgctgctcagtctatcggtgagccaggtacacagcttaccatgcgtactttccacagtggtggtgttgccggtggagatatcacacagggtcttcctcgtgtcgaggagctttttgaggcaagaaagccgaaaggtcttgccatcatcacagagattcctggtgttgctgctatcaatgacactaagaagaaacgtgaagttatcgttacagatcaggaaacaggtgaatccaagacttaccttattccatacggatcccgtatcaagatcacagacggacagatccttgaagcaggtgatgaacttacagaaggtagcgtaaatccgcatgatatcctgagaattaagggtgtacgtgcagttcaggattatatgatccgtgaagtacagcgtgtatatcgtctccagggtgttgagatcagcgataagcatatcgaagttatcgttcgtcagatgttgaagaaaatccgtatcgaagataacggagatacagaattccttcctggaacactggttgacttccttgaatacgaggacgttaacgagcagatggaaaaagaaggcaaacagcctgcagatggaaaacaggttatgcttggtattaccaaggcatctcttgctacaaactccttcctgtcagccgcttccttccaggaaacaactaaagttctgactgaagccgctatcaagggtaaagttgacccgctgatcggtctgaaagagaatgtaatcatcggtaaactgattcctgcaggtaccggtatgaaacgctacagagatgtaaggctcaacagcacaatgcctgaaccggaagtaaaggttgaagatatagccgaagaacttacggaagatgaagaaatcaaagatgatgagatggtcacaatggatgaagaacttccggaagacgaagaattcgatgttgaagaatctgatgaagaagaggctgctgaagacgaagctgatgatcaggcttcagacgatgcagaagacaacgaatgatccaacggagtagataacttatccggactgatttgatatgaattcacaagagaactatctgtgccgacagattttgccggcgaggtagttctcttttattttccggaacattccattgccgaaaaaagagaaaaatacaaagaaactgctttttgtgttataataccagtacattatgagcaggtaatgaactgtgaagtatttttacagttatgataaatatacatttttgtttccggtaacagcttgtaaaaagcattgaccgggacagggaaggaaatagaaattgaacagaaatggaggtgcaatatggataaagaacttccggtttcagcatggccggaatggaaaatcatagagaaaatcggcgaaggctcttttggaaaggtgtataaggcacagagaacagaacgtggaaaatctttctattctgctatcaagatcatcaatatacccggaagccagagcgagttgaacagcgtacgttctgaaacaggggatgagcagtccacaagacagtattttcagaatctggttgaggaatgtattcaggaaatcagtaccatggaatactttcgaggaaactcttacattgtctctgtagaagattttaaggttatggaatatctggatgtcattggatgggagatttccataaggatggaatatctgacaagttttatggattactgtgcggaaaagcagcttactgagaaagaggtaataaagctgggaatggatttgagtaaggcactggaatattgccggaaacttaagatcattcacagggatatcaagccggagaatatttttgtatccagatttggcgattttaagcttggagatttcggaattgcacgtgaacttgagcgaaccatgagcggattttccaagaaaggtacttactcttatatggcgcctgagatgtataaaggtgagaaatatgacagcagggtagatatttattctcttgggattgtgctgtacaggctgatgaatcataacagactgccatttatgagtctggaaaaacagtttatcacttacagggataaggaaaatgcattaaataagcgtgttgcaggagagcagatgagtgcacctgtggatgcaggaacacagtttgcccgtattatcatgaaggcctgtgcttatgatcctgcacagagatatcagacaccggaggagctttatagtgcgctggatgatctgaaaaatggaagatctggcagaatccggcagttacaaaacggtgttcagaaagcaggaacggataaaacagaatcatatagtgcaattgcacagaacggcagagcagcacagaatgttacatcagatgccgaaaatgtacgaaaaagtacagtgcagaatacgtcagtacagaatacccggggaaataaaaaaacatcagattttcagaatgctgcaaaaagaaaacgtgctgtaaacaatgttccggcgagcagctttacagataaagaaacaatgtcagttgtagcagaacagaaaatacagccacaggaaacgccatcagaaacaattgcgataagatctgcgcgtgctgtggaagccagaaagcgaagacgcaggaagaaacagctgctgcgcagggcattgcttgcaattgtggcaggtacagcgatacttatgatggccgccgtctattacagagtaagtacagatcatgctcaggaaggacaggaggataatccgatcgcaattctggatgatgagaaatacagctccacaaaatccggatccaaagatttctccaaagctctggatacgatcaaggagcaggcaacaactatcacagataatctgaacagttacgactgggttggaacagaaggaactgttctgcgatatctgagaagggtaaagactactcagcaggcagatggaaatctggatattgagagtgaatgcatgaaagcgctggtctatccggcagaatccggagatggagtttatgaagaatatttctactggggagagaaattattctttgcatatatctggtatgatgaaacttcagaatattattattataacgacggcgaactgataagatggatcgattccaatggaaaatgtcacgataacgaaaaagataatgaggaattcgtgaaacgtggcgagaaatactggaacaattcattgaaagcattgaagggagaaggaacaaagacagataatggcaatgtatcagattgaatgtgcatatacctgccatacaggaaatatccgggcaaataatgaagataatttctggtgttttggggaatcccttccggtgaacaatgaaggaacaaagggtatctgctcaaagattatttcgggtaacagagtaccggcaatggcagtatttgacggtatgggaggagaaagctgcggcgagattgcagcctttcttgcatcagaagaatttggaaaattttataatgcgaataaaagaatgctgagggatatgccggaagattttatagacgatgtatgtgagaagatgaatcaggcagtatgcagatatggaacagagcatcatatttggagcatgggaagcacaatggcgatgctcctctttacaccagagtctatgtttgcctgcaatcttggggacagcaggatttattttatggatggtggtaagcttcagcagatttccacagaccatgtttttggtggtacggcagttgggaaagccccgttaacccagtatcttggacttcctgaagagctgcagagactggaaccttctgtgacagaaatcgagcataaggagggatacagatatcttctgtgttcagatggagtaacagatatgctttcggacagtgagatagaggcgattctgtcacaggatatggaaatcccggagatcgtaaatgatcttcttaaaaatgctctccaaaaaggtgggagagataatgtgacgatcgtgctctgtgaagtacagaagctggatacagtccgcagaatgaaagaatggatgaaaaatctgaaagataaaaaatgagaggtggggcagcatgaagaaccgtatgcaggatctggattttgaacagaatgttgcgtttgataaagtacaggagtatgaatttaccagaagggcggcacagagatttcggcaggtggtaagcctggacagttttgaagacgaagatgcggatgttattttccactatttatataaagagatggaactggtgtcctttggcgaccatctgaagagatatatttatgaaagggcagagctggaagaacccttctcggaggttccacaggaagtgtataaggagattgtagtagattcctttaaggaaacctatacgcccaaatccatgaatcctacctctaccaagttgtcggcactggtgaataactggctgaatcaggcatctgtaaaaagagaaactgtttttcttctggggtttgggttgaaaatgaccacagaggatgtgtcggatttcctgacaagagtactgaaagaacaggattttgattttcacaatccggacgaggtgatctactggtattgttacagtacgcagcagggttatcacaaagcagaggaattgaagaaaaaatatgagatactcgctcctgtggaagtggaaaatactcaggttttatacggaagcaacctgtgccttgatacggaggagaaactgatcgattatcttgcccgactgaaatcaaaaagagtagatcccatatctgagaaaagtcaggcatttcaggagtttacaaagcttttatatcatgcgaagcagattattgccggactgtatcagcatgatgaagaggaaaaaggtggggataaggtgtggacagcagaaagaattacaccttctgatgtggaaaaagtaatctgcagcggaatccccatcaacaaaatgggcaatctgaagaaaatgtctgcttccattttggcaaagcatttcagccagaagcgtttcagcaggcagaggattacaaatattttaagccacaaactcccggtggagcgctttgacctgatcacactggaattctttatcgtctcccaggaaatggaggatgatgatccgtttaacagatacaagcattttctggatgagattcaggatattctgcttcgatgtggaatgggagagatatacatagtaaatccatacgaatgtttccttctcatgtgccttctcacagactgtccgctggcagtattttcggagatatgggagaagtcctatgaagagggggaagctgaagaggcataatggtataaacaattgtacagccggtgccggatatggcacgaaaggctgtggaacttttattaaagaaaataaaaggggaagagattgagacattgacgattcttcctgttgaatttgcagaaggaggcacaacccgttaagggatgtgcctccttcttttaaccgaatcaagtaagtcacctgcggaggttgcgaatatctgtctgatttatgataattatctggatagactgtagattcagaagagtgtgtttattcattataatatccgtagatagcacgtgcatctgcagcaatggtgctttgggctgcaccggtatcagtaagatcctgtgacataaagcatactacaaggtcaattcctttggctgtatcatagatgatcgctgcatcattttctacagtgtcaagttcgccggtcttattggcagtaccgacgccctctggaagttgtgcagggatcttgttttttcgctgctgcatttttaagtgataatacattgcatctgcgtttggaagagtagaagcgggaagggttccattgacagtctggtatatctgctttaaaaaggttccacagtctttgacggatgtatagttgtcgccgttttctttacttgcgagaagcaggcggttcatctgggtgctggtgaaaccatgttcctggcagaagccatttacttttgccatgcctgcagagtcatcgccgtttccaagccagtttaccagagtgttggcagcatcattatcactgacagtgatcatggctgaaatattactgtcaatttcgtctccgttgtgagactgggagagggtatcgtagttttcgtatacagctcccataatatacagtttgatcaggcttgctgcctgcatgggagtatcgttgatcatgccttcagaatctttcggcaggttgcagacatagacggaccaggttccgttatcagccggcagcagggactgtacctgtttcaggagattgtccatgctggaatcagtgttgtcggtaaatgtgttgttggaggaaggggaaagtgttccgttctgctgttcggattctgaagagggttcagcggattctgactgtgcaggagatgtttctccggtggctgccttgacagaactttcctgttctcttaattcatctaactgatctgcctgactgataagggtatttgcatcagtggaaatctcctctacggttttggagagtgtctgtactttttgctgtagtgtgacgagatggttcagtgataaaaatgaaacagctgccagtgcaatcactgcaacagtcagtatgccgatcactatatagagaaaaataggtttttcatttggctttttattcattgcggttttcctttcgtaattattattgtaatcaggattgcgggaactgcgaagctgcgtagcaatccgcagatatcaagtcaggggcaaaatgctttttgacacttacatcatcatgatgcaaagtagctgtcaatgccatttgcgattccctgtaccattgttttctggaattctgtgtcattcattttcagatcgtcattctggcttgtcataaatcccatttcaaggatcgtaacaggaacagtgctccagttaattcctgtcatcgtatcagtgtactggattccaaggttctgaaaacctgttgcagcacagtaggaatcgatgatgcatcgggataatcgatcagactgttcaaacagttgtgggatataagggttattctgagagggcgacatggtcagtgctcctgatgcagtatgggaatcatcgccgtttgcatggatgcggacatagatctctgcgccctgtgcagcagcatattgtgcgcgttccatgttgctgatggctgtttcattgtctgttcgtgtcatgactacctgatagcctctctgttccagttcatcctttagttgaagagagacctccagattgagctggtattcgggaacaccgctgtaggttccctgagttccgctggtacattttgctttcatttcagaagaaccgggaccgttgggctccggggcactcatatctacggactcactctgatgccctggatcgattcctattatatgtccgtctgtttcggcatcggaggagaaaacgccggcactggaatcagaaggggcgctggtgctgttctggctgaatacagaaggctttgatgaagattcttccgggatttcagctttttcttttgttttcttctgtgtggctgtttgctgtttttgtttcatgcgattgatatttgactggactgtgtctatggcggtagtgtaattgtctactgcctgtttgacttcgtcgtgttttgcagtgatctgttcggagattgtatcgacttctttttcagtggtgaggatctggtgcagtgtggtcctgttaaagaagatcagggctatgatgcacaggagtcctgtcagaaacagaaggatgctgatcatgctgggtttcttcatatattatagtgtcctttcctgagtttatagaatgttatagtgtgtctgcaagttgatttgcctgctttggttgttattataataaaagggagggggaaatgcaattgttagtgaaggggacgcgccggataatatttattttgtgtgcggtttcggacgctaagagatattatagcagttctagtaaataatgcatcttaatccagcccatcagagtgtgaaatcctgcgtcagatatctttgccgtgcgttagcacgcctgcagatatcttccttgtctttcgcactctgctgaactgtcttaaatgcattatttactaggactgctataaatctgcagaaatctgctaaaagcatgagcagccctctcaaactcgctacgttgcaaacttcgctcaaacacgtgagacggtctgctcataacgcagatttctgcagattaagtatctctaagcatcctgcaaatgcacacaaaataaatattatccggcgctgggattcgcggtggggaagtggcagtaaagtggttggagggggagcatattgtcagataagtttaatatggtgatgtagtgtatgaggaaaggattttttggttatgataaaaatatgaaaaaatactgtaaaattcaggagaaatgccttgacagtgtgagttttacgggatataatgagcaagcgtgcaaaaggaacgtttaatttttttgtgcgtaattacacgaatagcaaccgcaaggccccatagaaaaatctatggagaaataaatcgggaggtgaaatggaatgccaacattcaaccagttagtaagaaaaggacgccagacatctgtaaagaaatctacagctccggctctccagaaaacattcaactctttaagaaagaaagcagttgaacagtctgcaccacagaaacgtggcgtttgtacagcagttaagactgcaactcctaagaagcctaactcagctcttagaaaaatcgccagagttcgtctttccaacggaatcgaagtaacaagctacatcccaggagaaggtcacaaccttcaggagcatagcgttgttcttatccgtggtggaagggttaaggacttacctggtacaagataccacatcatcagaggtactcttgatactgcaggtgttgctaacagaaaacaggcccgttctaaatacggcgctaagagaccgaaaaagaaataattctaaaaaggtttcataagaattttaagaactgatcctattgtttaggacagcaggaattaatcaatcgaaaattcacggaagactagaactatgaatttgtacggtattccatataccctgccggttgcgggttaaatataggaccttaccagtgcgaacatgcaatagttatctgcgtgagtaccgatgatttaatcacaatgattaaggagggaagtaacgtgccacgtaaaggacatactcagaaaagagacgttctggcagatccaatgtacaacaataaagtggttaccaaacttatcaataacatcatgttagacggtaagaaaggtgtagcacagaaaattgtttacggtgcattcgccagaatcgaagaaaaagctggtaaaccagcacttgaagttttcgaagaggctatgaacaacatcatgccacttcttgaagtaaaagctagacgtatcggtggtgctacttatcaggttccaatcgaggtaagagcagacagacgtcaggcactggctcttcgctggttaacaatgttctctcgtaaaagaggcgagaaaacaatggaagaaagacttgcaaatgagcttttagatgcaatgaacaacacaggtgcatccgttaagagaaaagaagacatgcacaagatggctgaggcaaataaagcatttgctcactatcgcttctaatataggaggaaaatccattggctaaagagggaagagaatatccattagagcgtaccagaaatattggtattatggctcatatcgatgcgggtaaaacaactcttacagaacgtatcctgtattatacaggtgtcaactataagattggtgatactcatgaaggtactgctaccatggactggatggaacaggagcaggagagaggtatcacaatcacttcagcggctacaacatgtcactggactctggaagagaactgcaaaccgaagccaggtgctctggaacatcgtatcaacatcattgataccccaggtcacgttgacttcacagtagaagttgagcgttctcttcgtgtacttgacggtgctgtcggcgttttctgtgctaagggtggtgttgaaccgcagtctgaaaacgtatggcgtcaggccgacacttacaatgtaccacgtatggcattcatcaacaagatggatatccttggtgcaaacttctacggtgcagtagagcagatcaagactcgtcttggtaaaaacgcaatctgcttacagctgccaatcggaaaagaagatgatttcaaaggaatcattgacttattcgaaatgaaagcttacatctacaacgatgaaaaaggtgatgacatctccatcgttgacattcctgaagacatgaaggaagatgctgagctttatcatacagagctcattgagaaaatctgtgagcttgatgacgacttaatgatggaatatcttgaaggtgaagaaccaactgttgagagactgaaagcaacattaagaaaagcgacatgcgagtgtacagctgttccggtttgctgtggttctgcttacagaaacaaaggtgttcagaaacttcttgatgctatccttgagtatatgcctgctccaacagatattcctccaatcgagggaactgacctggacggcaacccggtagtaagacattcttctgatgaagaaccgtttgcagcacttgcattcaagattatgacagacccatttgttggtaaactggcatatttccgtgtatactccggtacaatgaattctggttcttatgtacttaatgctactaaggacaagaaagaacgtgttggacgtattcttcagatgcatgctaacaaacgtatggaacttgataaagtatattccggtgatatcgctgcagctatcggattcaaattcacaacaactggtgatacaatctgtgacgagcagcatccggtaatcctggagtccatggaattcccagaaccagttatcgagctggctatcgagcctaagactaaagctggacagggtaaacttggtgaagctcttgcaaaacttgcagaggaagacccgacattccgtgcacatacagatcaggaaactggacagactattatcgctggtatgggtgagcttcatctggatatcatcgttgaccgtctccttcgtgaatttaaggttgaggctaacgtaggtgctcctcaggttgcttacaaagagacaatcaccaaagctgttgatgtagacagtaagtatgcaaaacagtctggtggtcgtggacagtatggtcactgtaaagttaaattcgagcctatggatgccaacggagaagaactgtacaagttcgaatccacagttgttggtggtgctattccgaaggaatacattccggcagtcggcgaaggtatcgaagaagctatgaaagctggtatccttggcggattccctgtagtcggtgtatatgctaacgtatacgatggttcctaccatgaagtcgactcctctgaaatggcattccacattgcaggttctcttgcattcaaagatgctatgcagaaagcagctccggttcttcttgagcctatcatgaaagtcgaagttactacaccagaggattacatgggtgatgttatcggtgatatcaactcccgccgtggtcgtatcgaaggtatggaagatatcggcggtggtaagatgatccgtggatacgttccactttccgaaatgttcggatatgctacagaccttcgttccagaacacagggacgtggtaactactctatgttctttgagaaatatgagcaggttccgaagtctgtacaggaaaagatcctttctaagaaagactgataattattgatcatctgcagtctgccggtgtttaaagccggcagggtgtaggagatataaagttactgttcactatgttctcagtaatgtgtggactgtaatgatacaacaattgataatgatacactgtttatagtgtgaaacttatcaaattgtataaaatgcttgcaaatattctgattatgcaatataatcaaggatagtaagtttaaaaccgaaaagatgctctataataatataagagccaattgttttaaggaggacgttttaaaatggcaaaagctaagtttgagagaacaaaaccgcattgtaacattggtaccattggacacgttgaccatggtaaaacaactttaacagctgcaatcacaaaagttctggctgagagagttgctggaaacgtagtagaaaactttgaagatatcgataaagctccagaagaaagagagcgtggtatcacaatttctacagctcacgttgagtatcagacagagaagagacattatgcacatgttgactgcccaggacatgctgactacgttaagaacatgatcacaggtgcagctcagatggatggtgctatccttgttgtagcagctacagatggtgttatggctcagacaaaagagcacgttcttcttgctcgtcaggtaggtgttccttacatcgttgtattcatgaacaaatgtgatatggttgatgacgaagaacttcttgaactggttgagatggagattcgtgaacttctttccgagtatgatttcccaggagatgatatcccggtaatcaaaggttctgctcttaaagctcttgaagacccgaacggtgagtggggagacaagatcatggaacttatggatgctgttgacagctacattccagacccacagcgtgacacagataaaccattcgtaatgcctgtagaggatgtattctctatcacaggtcgtggtacagttgctactggtagagtagaggctggtgtacttcatgtatctgacgaagttgaaatcgttggtatcaaagaagaaacacgtaaagttgttgtaactggtatcgaaatgttccgtaaacttcttgatgaagctcaggctggtgataacatcggtgcacttcttcgtggtgttcagagaaacgaaatcgagcgtggacaggttcttgctaaaccaggaacacttacatgccatacaaaattcacagctcaggtttacgttctgacaaaagatgaaggtggacgtcatactccattcttcaacaactatcgtccacagttctacttcagaacaacagacgtaacaggtgtttgcaaccttccagaaggaacagaaatgtgtatgcctggagataacatcgaaatgacaatcgaactgatccacccaatcgctatgagccagggtcttactttcgctatccgtgaaggtggacgtactgtaggatcaggacgtgttgctacaatcatcgagtaatcactgactaatatatattgagtaccgcaaggtacattgtgtccaaacgtaagataccccggaaccgtaaggtttccggggtttttctgtactctaagaaaagaattattcgtaaatttatcaggttagtaatagtgaaacatttatcagcaagatgaaatacagataaatttataattaaaaaataagaccagcggtgccaaaacggtgccaaaaagaaactcctgcgaatgtttgctattcacaggagtatttttttaccagcctttgatctgtttgatttgttcagcacgttctggatcacgatgatattgtaatttcagacggatagtttccacaacttcctgtctggattcatcatcaagctgatagaacgatgtaagcagattatctacatcaggcatactgttcttaccgaaaaggtacatcagcggatacatagaattttttaagtaagtctttacacgacttgcgtctaatgctccgttcaaaccgtctggaagtgtaggataaatctcttcttccttaattgtgccagaaaatggactggcagaacatatctcattcacatcaatttgcaattcattcgcaagtcttaatgcaaaatcaaatcgaatattggaatctttttgaataattgaatataaggttgtagcactgattccggttgcctttgcaattttgcggacatttgtgcctttttcatcaagatatttctttaaatttttaccgtcacccatagaatcctcctttttcatatattagaaaattacgaaaaacataaatctataaaatatcataacacagacgtggaataaaataaagaaaaaatagtgtacgaagttcgtaaaaatgtgtttacgaaatattgacaacgatagaaatacatgatattatcaatttacgaaaatcgtacagatatagaaatacagtaaacgtattctatatctggagaggaaaggaggaggcaatatggcaagttacaattatatgatgagtgctgatgaagtggcacaggaattaaactgctcaaaatctcatgcctataaactggtgaaagctatgaataaagaattatctgcacagggatatattacgatggctggaagaataccaaaggcgttttgggcaaaaaagatgtatggctatgaaatagcagaaaattagggaggatcaatatggcttacagagaaaaagacacaaaaaaatggacagcccagtggtttgagacaaatgtcatgggtgagaagaaaaaacgcagaaagcgtggatttgaaacaaagcgagaagcattggagtttgaacgaagcaaaaagttgagcaatgagcgaagtatggatatgaagctgagcgattttattgagatttatttttcagacaaacaaaatgatctgaaagatcgaacaatcaaaaataaaagatatatgatgcaacagcatatcgttccatacttcggaaatcagatgatgagtgaaatcaaggcttcacagattattcagtggcagaatgaaattcagaaaaaaggctattcagattcttatctgagaatgattcagaatcagttgaccagtctgtttacacatgcagctaaaatctatgacttgccggttaatccatgcaagaaagtgaaacgaatgggaaattcagattcaagaagtttgaacttctggacactggacgagtacaaacagtttatacagacaatggagccgggaacaagatattatcttatgtttgagatgctgttctggactggatgcaggatcggggagctgcttgcgattacaaaagctgatatcaattttgaaaagaatcagcttagtatcaataagacttattaccggacaggaatgcaggatattatcacagaaccgaaaacaaaacagtcctttcggacaatcgaaattccggaatttctgaaagaggaaattaaggaatttgtagatggtcattacggaatgccggatacagaaagattatttccggttgttcaggaagcggtacagcataagatgaaacggcagattgagctggcaggagtgaagaaaattcgagtgcatgatatcaggcacagccatgtggcttatcttattgagaaaggtgtggaaccgttattgattcgggacagattaggtcataaagatattcgtatcacattgaacacttatggacatctttatccaaatcagcagagaaagattgcaaatcttctggataatgaaaatggaaatgctgttaccggattgggagaagaaagagatgaatgttgaaaaggcaaaagaaaaagcccagataaataatctgagcaagttctctgataatcagattcactgatataccatcttggcagattcagtatatcacgaatcgggaaatacgacaattcccgaatatctgttcatcagagacttgcccggaagggcaggaggagatgatggaatgaatatgaatgaaaaaaataaaattgagaattgtagaatagaaccaaaactgaaactgatcaatatggattcagtagaggtggaacaggtagaatggctgctttatccgtttattccttatggaaaagtgaccattatacagggagatccaggagaaggcaagacaacgatggtacttcagattattgcaaaactgaccagaggagagccgattcttcctgttactgataaaacgaaaacaaaagaaaaacgaagtgatgaagtcgatagtgagaatgaagatttagatgctgaagataatatgcaggaacagtcttctgtgtcacctgtaaatgtaatctatcagacagcagaagatggacttggagatactatcaaacccagattacttgctgcaggtgcagattgttcaaaggtgctggtgattgatgacagtgaccagccactgacaatggcagatgtcagattggaagaagcaatcgtgcagacaaaagcaaaaatggttgttcttgatccgatacagggctttctgggagcggacgtagatatgcacagggcaaatgagatcagaccactgatgaagcgtatcgcagtgctgtcagaaaaatatcactgtgcagttattttaatcggtcatatgaacaaaaacagcaacggcaaatcttcttatcgaggacttggctccattgattttcaggctgctgcaagaagtgttctgattgtcgggcgagtgaaagatgaaccggaagtaagagtggtatgtcatacgaagagttctcttgcaccggaaggaacgtccattgcattcagactggataagaataatgggtttgaatggattggagaatatgatatcagtgccgatgaacttcttaatggagacggaagaggacagaaaagtcggaaagcaaaagaatttctccttgagatactggcaaatggaggaatgactcagaagaaaattgcagaagaagcagaagccagaggaatcaaaagtaaaacgctatggaacgccaaacgggaacttgaaattgattccgtaaaacgtggaaagcaatggtattggatgttgccagaataaaaatggaagatggcaagattaccatttcttaagaagaggggatcttgctaccttgaaaggagaatagatgcaaaataaaagtgtacagattccatacgagttattctttcagctcttgcaatattttttgatggataactacgatggtgaagaaataatacggttgggattggagaaaaaactggatgcaatggtgaatcgtgaagtatacagcaaatccaaaacagcaccaacggaagaagaaagagaaaagttccggaaggaatatctggacagacggggaataccggagaactttcgatggtaaaggttctttctgaacactttattacaggagcgtgtcacgcacctgtagatagcagacaaggagaatgttggtaaggtgtagtcgggagttgactggcgtagaagagaattttcaaaagggagccctgattcagggcgcccctgcggaaacggtagatgaaaggagattggcacaatgagagaaggaagattaggatataacagttataacaaaagatatggattattatcatcagatctatggattgatacaggatttcactgtggagaatgcctggaagtgttgcttgatgatgaatgggttcagaccagaatggaaatgaatcctgcaagagaatggtatcttgtagggacaccgtattgtggtgatttggaatatattcgggcaaggataccggagtaaaggtctctgtacccccggagggcgcaagggtacttttgatggacggtacggctgtcgaaagtgcttttgcgttacttttgacaaaagtaacaaaaccgccgtatccggcgaatatttctttttatactatagctggcaaagatacaaatttatgtgccatgtctggcactggttttagaaagcggggtgaggaatatgacgatgaaacgaacaatcagtggtatgatcgggacagggtctctggctcataacagacgagattttatagcagaaaatgttgatccagacagagtgcaattaaatatttgttaccggaatgagaatctgaaagaagtctataaagagctgtttgatgaagctgtagaacggtataatgtcgggaaaagaaaagatcggcagattacaaattattatgaaaagattcgccaaggaaaacaggaaaagttgttccatgaagtgattttccagattggaaaccgagaagatatggctgttggaacagaagcaggagatctggctgtaaacgtactggatgagtatgtaaaagatttccagaaacggaatccgacacttcgggtatttagttgctatctgcatcaggatgaggctactccacatctccatattgattttattccttatgtgacggactggaaaggaaaaggaatggataccagagtttcactgaaacaggcattaaaaagtcttggatttcaaggtggaaataagcatgatacggaactgaatcagtggataaatcatgaaaaagaagttctggcagagactgcaaagcagtatggaattgaatgggaacagaaaggtactcatgaggaacatctggatgtctataacttcaagaaaaaagaacggaaaaaggaagtacaggaattggagcaggagaaagagcatctaactgctgaaaaagaagaattaacagcacaaattgcagaatccagagcagatatccagaatttaaaagacgataaggaacaggcaatcaaggcgaagcaagaagcagaacaaaaggcagggagcgcagaaaaagaactaaaaagcctggaagatcgcagagaacagctacaaccgattatggatagtgtgagcaaagaaatcaaagaatatggaacggttaaaatgttactgccggaggcgggcacgctagaacgggcagtaacctatcgagataaaaaaattaaaccactgtttcttcaaataaagaataaggttgctgtaatggcggctcaggttaaagaacttacgaaagaggtggaaggttggaagagaaaatatcaaaaggtgaaacaaaaatataatgctattcagagagaactggatgatatacgtaaagataatcagaaattgtcagaagaaaaagatatattacaaggtgtttctgataggtatgatcgtgttgtgcgtgttcttggaatagaaactgtagatacagcagtacagcaggatattcaaaacgagaaagtcctggaagaaaagcgacggatggaacaaatgccgaagggaaatattcatgaaagattggcatggggaatgaaaaaaagcgagatggagaatcagcagcgtaagaaaactaaatcaaaaaacagagaaatggagagataagattatggaaacacacatttatgatgaaaagaacggattaagctatactttgcatggagattattatttgccggatttggtattgaatgaagaagaaccgatatatgggaaatatggaatgctgaggaaacagtttctgaaggaacacagattagcaaaatatcaatatttgttgttgactggaaagctgacggaacacctgaatcaaattgatcaggagagcagagagcaggtggaaatgcttatggaacagatggcagaaaaacagggcgtaactgaagaattaaaggtacagaatcggacgaagtgggttagactgatgaataatataaaagctagtgcagaagaaatggtgttgaaacttctgaaaagcacattgtttgtaaaactccctgctattaggttccacattctcacctcctttctcgttggaaagttggtggtgcttcccccttttcgcggggcaatacggcgtttttgaaaaacgccgaagattttttgaaattttttcaaaaaattttttgagcagcaaaatacgcctgtccgaaaagcccggacaggcgtataggtattgtaagcagtatttagatgattagacagttcatagtcaagggtagagaggttcccggcggtggtcgggctttttttgatatgtcaatgaccgtcggattttgtcgatagggtatgtgcttcatggcggctaccttctttagccgccgcttttaacagtgataccgcgtcatttcattagaagataaaaagaaacggcggctttgatttttcaaagctgctgcggaaatcaaagaacgacaagcaacagttctgattttgctccaatatggttattaggggcacaaattaaaatcaaaaaagagccgataacagcagtatttcaaactgcatattatcggctctgcgtctgtgcgtctggctcttttaattaaattatttctgttgttttttggctttattatatgtattagctaactgtccacaagctgctttaatctctctaccatgagaaactctcatggtaacttcaagtcctgtttgctctaattgatgtttgaacgcaaccatttcttgtttttgtggtgctctaatttttgaattactcgtcgggttgtattgcagcacgttaatcataacatttttgcccttaaaccattttgcaagttgccttatatctgaggaacggtcatttatacctggtaaaagcaaatacgcaaataccacttttcgattatgcctttgagaataggacaatgcttgcttaacaacatcttcaatagcgtacatgtgcatatgaggaatgatacagtttctcgcagcctgtgttgctgcatgtaaagatattgtcaactgaatttttagatgttcttcgcgcaatttttttaattgattaactggaccaactgttgatacggtaatgccgtcggttggaaagttaagtccatttctatctcgaagaatatggattgctgcaatcaagttgtcgtaattgaataaaggttctcccattcccataaaaacgatacgatttactttttgacgtatcaatacaacctgctgcacaatttcagacggtgttagattacgaacaaaaccattgcgtccggactcacaaaaaatacagccaacagaacaaccaacttgcgtacttacgcaaacagtcccaccatctcgccgtttaataaaaaccgtttcaatatacctgttatctttcaattcataaacatacttttcagtatcgctacttttatagactttttttgttgatattgatagattttctttgtgaaatggctgtttatacaattccgtatataaggctcttgctttatcccctccaattacttccgacatttctttgtaagtaaatccgtatgggtcattcaatatttccgtaggtgtacttttaggtaagtgtttcatttaaatatccttccttttcaaaattaaaaagtttgtttttcagagtttttgattatgatttctagtttttcaacatcaacgatatgcgttaatttacatttagggcagaaaagaggaaaatttcttaataccgtattataaaatacttgaaccctcgtctttccgttacaaattggacattttatccaatatttttcaagcataatatttctccttttgcgcaaaaaaatgcaggtcaattctcaacatgagcattgacctgcatttatacatataatactacaacaaaattaaggcatagtttttatactatgtctatacgtcgttagttttgttgtatagcatacgcaaaataagcatgacaaaaaagcccatattgaaaatgggaaaaatcttttttgatttcaatgcttatcgaatacgcatgctatgtaacataaacattcccccccttttatataatattatatacaaaagcagcttgttgtcaacatatatatatatgaattattttggctaactgatagaactatgtagacatatccaagaagaaaggggaacagtaaaatgtaagagggtgaataactatggcaaaaagaccagtaccaaaatacgacttcaaggcttttggggcagcgataaaggcagcgcgtgaaggacgcaaggaaagccgcaagaaagtaggcgacgaaatgtttatctcgccgcgctaccttgcgaacattgagaacaaggggcagcacccaagtttacagatattctttgagctgatacagcgttaccatatatccgtatctcattacttccagctttggcacgactattgaaaattgatatgaatgaattgttttcgtttcatgaagaattgacagaaaaagagattggacaatttgtgaatgaactttcggaagtttcattggacagctttacagaggctttcgagatggcatctcgtaaaatacaggagtatcctcattgcgacttattaatatatacgatcgcaaccgttctgaacggatctttgactttgtcagatcttaatgacgaagaacgaatggaatataatacagctattattgagtggctggaacgaacagcagatagtcaggatgaaagagtgagaaattcaagcgtttttatacttgcaacaaaatatgtccaaatggagaaatatgaagaagcaaatgcccttttgaaaaaaattcctgatactgtaattgatgcaacgattatgaaaacaagtgtattagcacatcaggaaggaacagatactgctgcattattcttagaagggaaattgctacaggcagttatcaatatccaaagctacttgtataagttaatagaaatggaagaagagacaggaaatcatgataaagcagagaaaattgctgagattacagatcacatgatatcattgtttggactatggaattatggcaacacagttccatatctgctgattgctggatatcgaaaagatgtagaaaaatgtatccagttaattaagcgattattaagtgaatcacagaagccttggaatatgacacaatcccctttgtattacaggtatgaagatactgcacagggaaaagctttttcgggacttggaaaaaattttgttcgtgaattgtattcggaaattgaaaataagaaagagtatgaattcttgagggggaataaggaactcgaatcaatttttgaggaacacttgaaataggttgtaaaaatgtatggaaatagatgtagttgagaaagaagaaaatttttgacatttccacagatgcgtgctaatatgattatagaaaaagagtgctaccgatagacggttagtccacatacttattgattacaaaaataaccgttcagtttgcaggctggggcggttatttttgtggtttatgattatctttgcctaatgtatatccgatactaaagcaggttaagccgaagctcactactgctatgaagtccacaatactcattggcttagccctcctttccactggattcctttacaggtttctatgtaatcagagggtcacagtccctctggagaaggactaaccgcctaccgttatggtagcacccatgtttcgattataacagttaaaaattaccggtgcaatataaagttggtagagaagtatctagtatctacagaagagaatcggtttgagtattctccggtgccaaaacggtgccaagaaatcaggcaaatcaaaataggtggtgcaattcagctgtttttcactgtattttggagagaaaaccataaaaaatatgagataaaacgggattaaagtatcgtgaaggtggacgtactgtaggatcaggacgtgttgctacaatcatcgagtaatacaatctgaatatagatttgttatcgcaagataacgttgtgtccaaacgtaagatacccgtagaacttcggttctacgggtttttctgttgcctggaaaatataaaagggcggaaaagaataacgaacagcatagaaaaacggttgccgggagagtatcctgacaaccgtttgtgataacagaatgataacaaaatttatatttgataatatgtaaaagtataaaaaaagcaagagaaacatacacttaagatgtttgacttgcttttttcctcctgtgtttcgcaataacaataatcatcggatttctctcaataatcacatactgtaaattatctccacctatggaatgatttattgttttactattatatgaaattataatcaaaatgtcaataggaaattattgctattttaattcgaagttgaatttaactgtgttaattgctctaataattcgttgtatctttcctgtaaatcatgtttttctttagttattttagtcagcttacgattgagacgattgcgttcggtttttaaattattatatgattttttcagtttttttaattctactatattcttttggttttcggtaacatctgtaggaagaatacgaacaccccaacatgcccgcaaatcttcttgagttaggtcatgattgccattataagcagcaagatgaattcgtttcataaattctgttcgttcgttatcggtacgagtgtaccatttgatataattgaatgcaataaagtccgctaattgcaatccagcgtgattatcctttttggttacaatattaaaaaatcttattcgattataaattgtacgattagttaaataagaaacgccctttccgtttacctttactttgcaaaaattatgaaacatcttgttatcaagcgaattacttcttgtgttagatgaattggtacgtgcttcatagatgatagatccagcaccatttactttgcataaaaaatgtgtatatgcttcgagaatttcttgcatagcaatatcataccaatcatctattaatcttggttcgtttggcagtgcataatatgatcggaactttttacgatcaataatgcaacatagagtagtaatctcttgatttttcattaacaatgaaaaacttttataaacattttgatagcagtctgcaatttcctcttttgttttagtgttgaatacagtatatgcaccgttggtaaaccttgaaatttgagaattattgcggtttttataagcaatgtttaattctgtactatgtaatattggtgataaagaagaaatttcagtaggtgtccagataagttgttttatagattctatctcgttggagacaatatttaaatcagaatttttaattatacaaccggcgatacaaaataaatcagtattatcatcgtaactttcatcaagaaataaggtatattctgtcatctttatactcctttgttctttgaattttatttaggttaaatcataggatttaattaggtgtttttcggttccttttttaataacagtatggcatcctatcgttgttcccatagcacgcaatttccattcttcttgggtagcgttcagtttatccagttcttcctgcctcttatcttcatcttcaatagctaatatttcagctttttccttttcgtagacatttttaaactgacaccatttcttaaagaaatcctgcattgtaggattagcaaatgtcattgcaatattctgatctgaggtctctgagagagaaagatttacagagtcatcgattgcaaataggatggagagtacatctccaactgtctcaatattgaaatcaagaaaaacacttacatttaatcccagtgcagttgctatcttttctaactgatccggttttggattccggattccaagttcatattttctgatcgttcctacgttaatgccggacagctcggctaactgtatctgactgtatcctctaaattcccggaacgcccggatttttttacctaccataatgtgctgcctccttaataatatttgtgattctattctagcacaaaagtgaatgatgcgaaagaggttgattttcgtagagcctcaaaatgtagaatggaatataaaaataaaattcgcaaaaggttattgacaaattcacaaaagtgaattatagtataaaacatcaaaagagtcacaaaagtgactgaaaaggaggacgctatgagaactaattatatgatgactgttgatgatgtcatggaagaattaggtgtgaaacgcagtaaggcatattccattctgaagcagcttaatgatgaactggcaaaggaaggatatgttgcagttcgtgggaagataccacgtccttactgggaaacaaaattttatggatgctctcagagagcagtatgaaggagggtttaagatgtcagcttacaaagacaaaacacagggaacctggtatgtgagcttccgttatattgactggacaggaaagaaaatacagaagctgaaaagagggttcaagacaaagaaagaagcattgaattatgaaaaggaattcataagaaaaactgcggcggatatgaaaatggagatgaacagttttattcaggtctattttgaagataaaaagaatgaactgaaagaaaattcaatccgtaacaagcagcacatgatgaacaagcacattgttccgtattttggaacaagaaaaatgaatgagattacaccggctgaaattatccagtggcagaacaccattcaggaaaaaggatacagcaagacttatgagcgtatgattcagaatcagttaaatgcactgtttaaccatgcacagaaaatttacaatctgaaggaaaatccatgtaagaaagtaaaaaagatggggaaatcggatgcaaataagctggaattctggacgaaagcagaatatgacagatttatcgccgggattgagccggggagtgaggattatctgatatttgaaattctgttctggacaggaatcagggaaggagagcttctggcattgagtctttcagattttgatatgagtggaaatctcctgcatatcaataagacgtataaccggatcaggaaaagagatgtgattgatactccaaaaacagagaattcagtccgtaccattgatattccaaattttcttaaggaagaggtgcaggagtatgcgaagaaacattatggatttccggaagatcagcggttgttcccaattgtagcgagaacgctgcagaaacgtctcaagaaatatgaagcattgactggtgtaaaaccaatcagagtgcatgatatccggcatagtcatgtggcatatttgatttatcagggcgtagagccattgattatcaaggagagactgggacacaaagatattcagatgacattgaacacttatgggcatctgtacccgtcacaacagaaaaaagtagctgagatgctggataacaaacgttaatacggaggtagaagcaaatgaaaacaaagaaagtagtcggaaaaatatttgatgcaattaactacagtaagaagttgaagataagttctattttaccagatcgagattcagattatgtgattcttcttgaattagaggacggaagcaaatttgaaattatcattattcctacaaggagatttgtgtaaggagcaaaagctatgactactgacagacaaaaagaaaaagcccagacaaaatatctgagcaagttctctgataatcagattcactgatataccatcttggcagattcagtatatcacgaattgaaagatacaacaattcccgaatatctgttcatcagagacttgcccggaggggcaggaggtagaagtgacattatttgaacaggtaaaagaatgtgtgacagccagacaggctgcggagcattacgggataaaagtaaaaagaaatggaatggcgtgttgtccgtttcataaagaccgacacccaagtatgaaggcagataaaatatatcactgctttgcatgtggagtgggcggtgatgcgatagattttacagcaaggttatttggaatatcacagtatgaagctgcgaaaaagatgatagaagattttggactagatataaaaatcgaagacagaaacaaatacaaaaggacgcaccaaagcaggaatactttaatatcaaagaaacctaaagttgtgatgatcagagaaaaactggagcagtggttgaaacatgcaacagacgtgctgatcagatatctgaaatggattcagttctggaaagagatttacaaaccagaaccagatgaagagtggcacgaattatttacggaggcattggcaaatgaaagaaagataaatgactatctggacgtgctgatgtttggaacaggagaagagattgtagagtttttcaagatgaagagaagggaggttgaaaaaattgaagaaagaattaacgaatatcagcgagaagtccttgatggaattagaagatattgtgaacgaggaaatgcttacaacagaagatgtcaataatatgttggagcatacggataaaggaagaacaaagcagacaattagaaattgtgtaaccgtacttcaaaatgatccggtattgaaaaaagcgattaaacgaaatgaactttctggaagaatggacattgtaaaagaggttccctgggagcggaggaataacagtcctacggttacagatactgatgaaaataatttgaagatgtatctggaagaaaattatgaactgacaagtgagcgtgtgatcaaagcaggagtagatattgtttccaatgaaaataaatatcacccaattagggattatctggagagtctggtctgggacggaattccaagaatagaaaatatgcttccacattttctgggagcagaaaagagcaaatatacaatcggagtaatgaaaatgcacatgctggcagcgatttcaagaatttatgaaccgggaataaaatatgatattatgttgtgtttggttgggagtcagggagccggaaagtccacatttttcaaatatctggcgataaaagaagaatggttcagcgacaatctggatcatttggatgatgaaaatatttacagaaaactgcaaaatcactggattatcgaaatgggagaaatgaaggcaactatcacagcaaagaatattgaacagataaaatcgtttctgagcagacagaaagaaacttataaagtaccttatgaagttcacccggaagacagaccgagacagtgtgtattttgcggtacttcaaatgatctgaatttccttccgctggacagaaccggaaacagaagatttgctccggtgatgacagatatgtcgaaagcagaagttcatattctggataatgaagcagagagcaaagcttatatcgaacaggcctgggcggaggcaatggtactgtatcgacggggaaatgtgttcttaggatttacaaaggaaattgaggaagaggcaaagcgtctgcaaaaagaatttatgccggaagataccaatgccggaatcatacaggcatttcttgatgattacgatgacgagtatgtatgtaccagaattctgttcgatgaagtgctacatcgaaccggagaaatgaaacagtgggaaggtaaagagattgctaatattatgaacaatgcaattgaaggctggaaaccacatggtacacatcggttcggaaaggaatatggaatacagcgttcatggaaaaggatggaagattctgtgaagaaagataaagacggctttatggaagtaccggaacagttggagataccgtttgagtaaagattattgtaaacgatgtaaacggaacttgaaggaaaaacttaaaaagttaacttttaaaatcttttgagccccgtttacaaattccgtttacaaattggaaaggagcagaaaatgatgaaacagggaagattaggatacaacagtagtaatggaagatatggattattatcatcagacttatggattgatacaggatttcactgtggagaaggactggaagtgctggtaggtgatgaatgggtacagaccagaatggagatgaatctggcaagagaatggtatctggtggggacaccctattgtggagatctggaatatgtgcaggcaaggatacctggataaataggtctatgatccgcttcggctggtgtaaagcagacgtccaccggacgttatgcccccggcagggcgcaaggggacttttgatggacggtacggctgtcgaaagtgcttttgcgttacttttgacaaaagtaacaaaaccaccgtatccggtgaaagtttcttaaatatcgccatgtctggcgtaaataaaaattatgtgccatatctggcactcaaacagaaaagaggtgacaaaatttatgatgaaaagaacaatcagtggcatgatcggagctggctcactggctcataacagacgggattttgtagcagaaaatgtaaatccagacagagtacaactgaacatttgttataagaatgagaatctgaaagaagtctataaagaactgtttgatgatgcggtggagagatacaatgtcgggaaaagaaaggatcggcaaattgcaaattattatgaaaaaatccgacagagtaaacaggagaagttgttccatgaagtaatatttcagattggtaatcgtgaggatatggcagttgacacgacagaaggagatttggccgtaagggtactggatgaatatatgaaagacttccagaaaaggaatccgtcacttcgggtatttaactgctatctgcatcaggacgaagctactccgcatctgcatattgactttgttccttatgtgaccaactggaagggaaaaggaatggataccagagtttcactgaagcaggcattgaaaagtcttggatttcaaggtggaaataagcatgatacagaactgaatcagtggataaatcatgaaaaagaagtgctggctgaaatcgcaaaacagcatggaattgaatgggaacagaaaggcacacatgaagaacatctggatgtttacaatttcaagaaaaaagaacgcaaaaaggaagtgcagaaattggaacaggaaaaagaaaatctgacagtggagaatgaaggattgatttctcagattgcagaagcaagggcagatattaagctactggaagaagaaaaaattcagttccagaaagataaagagatagcggaaaaacgtgcggagaaagcagaaacggaattgaaaaaactggaggacagaagagaattcctgcaaccagtgatggataatgtcagtaaggaaataaaagaatatggaatgattaaaacatttctgccggaagctacagcattggaatgtgcggtaacttaccgggataagaaaataaaaccattattcattgaaatgaaaaacaaaatcggtgcgatggctgcacaggtgaaagaactcacaagagaaagagatagttggaaaagtaagtttcagaagaaaaagcaagagcatgaaaaaacaaaaaaggaactggcagaagttcagaaagattatcagaaattgtctggtgagaaagaaatactacaggggcttgcggacagatataatcgacttttacgcatgctggggaaagatatggtagaaagactggtacaggacgatatccggatacaggaggaacttgaagcaaaaaagaggaaagagcaaatgccgaaaaaataggtgaccgcatacaatgggcaagagaacgaagtgaagaacacaatgcacaaattaagaagaataaagcaaagtacagaggaatggagttgtaagaatatgaagaaacagatttatgatgaaaagaacggactgaactacacactgcatggagattattatctgccagacctggaaatcaatgaggaagaacctacatatgggaagtatggaataatgcgaaaacagtttttgaaggaacacaggagtgccaggtatcaatatctggtactgaccgggaaactgacggaacatctgaatcaggttgataaggaagtgagagaagaagttgagatactgatggaacagatggctgaacagtggagcgtgacggaagaattgaagatgcaggatcagatggaatgggtgaggaggaggaataatattaagaatgttgtggaaggaatggtgttattagaaatgatttatgcataaaaaacacatataaaagaaaatcgaatatgatatgagaaagggcacgttgattaaaaacgtgtcttttttctgtttgcagggaattgaatagtggctgttagtttgatacaataaaatggattatacgatattgagggtgagaaaattatgccgatgaaagaacctcgttttcatggcgaagttacagaaaaaagtcataaaaacatgagtaaaatacgtggaaaagatacaagtatagagattgtgttgagaaaggcattatggcataagggatttcgttatcgaaaaaattacaagggattgccaggaagaccggatattgccctgacaaagtatcgtattgcaattttttgtgacagtgaattttttcatggaaaagattgggaaatattgaagcctcgattagaaaaaggaaaaaatccagattattgggttaagaaaatagagcggaatatccagagagatgaagaaaaggaccagcaattaaattttatggggtggactgtgatacatttctggggaaaagatattctgaaagatacagaacagtgcgttagagtgatagaagagacaatatttgaccagaaattggaagaagtagacgatgaagaggaaatgtaatgatgaattatttggaagaatacgatgaaacggatcctatttcaattgaaacatatgcaaaaaggttgattggaaaaacatttgcggatgtgtgcaagcaggatgatatcactaaagctatggttgtcagggaggcaacaaattatgaggtaaagcacgagaataagaagcgaaaaggtggtttgggagaactgatagaagagagattctttcactatcagacgaataatgacgcatgtccggattttgataaagcaggtgtagaattaaaagtaacaccgtataaacaaaataagaatggaacactggtagccaaggaaaggttgatattgaccatgattgactatttttcagttgttgatgaatcgtttgaagatagtcatatgtggcaaaaggcccgattgattttattggtgtattatttgtatcaacaagagataaagaaccggttagattatcgtattggatatgtgaagctgtttgcaccaccggagcaagatataaaaatcatagcacatgattttgaggttattgttgagaaaatcagaaatggaaaagctcatgaattatctgaaggggatactctgtatctgggagcggcaccaaaggcagcaacgtcaaaggatcgaagaaagcagccatttagtgatgaagtagcaaaaccacgggcgtttgcatttaaaaattcatacatgacatatgttttaaataattatattattccaggaaagaatacatatgagccaatcattaaagaaaatgcagaagattcttttgaagattatgttgtgcgaaaaatagatgcttattatgattggtcagttactgatttatgcgatacatttcatattgagtatcagaaaaagccgaaaagcctggaagcaatgttggcatatcggatgttaggaataaagggaaatcatgcggaagaatttgaaaaagcaaatgttgtagttaaaaccatacgtattgaaaaaaacaacaaaataaaggaaaatatgtcattcccaacttttaaatttaaagagttggttaaggaagattgggatgactccacatttggaaactatttgcgtgaaacaagattcctttttgttgtatataagtatgatcaacagggagaccttcggctgaaaggatgtcagttttggaatattccttataatgatttggaaggtaatgtaaaatcagtgtgggaaaagacacaaaaagtactccgtgatggtcttcagatagaaaagaaaaacggaaagaattataataattttccaaaagcatcagaaaatccggtatgccatgtaagacctcatggaaaagatgctaaagatactgatgaacttccagatggaagaatgtttacgaaacagtgtttttggttaaataatagttatgttttgtcacagttagataaaaaattgatagaggagtaatttatggcaggaaaaaaaacgattgcatatccaatagagttgaaatttgtcactcgaactccatacttttttaatggggcaaaagacaaatatgatttacataaagatgagatagataatatcttacatttgcttgagggagaatatcaggtaggatatgtaaaaagaaaacgtaagtttcctcatggtataaatgcaaattcgttaaatgaagcaatcagagctaaattaaaattgataccgggaattgaaggggaaacgaatgttgtttttggaagctttttaccgccggtatctggaaaaggagaatttgatttttcacgatatgataaattaacaaatttttatcgtttttggaattactgttatggtataaatgcagctagaaatggacaagaaatatttgatcaatatattaggtctccaaaaacaaaacaagattgggaaatgtttattgaggttcaacatccgaaaaaatatgaagaagaattagaaatgccatcagatatatttaatattattggcgaaatccaatttggaaattgggcaatggtatataaagatatgtttagactggtttctgcaataaataagcaagcagaaatcggtttgtacatttatattgttgcggctgataatttgaaaaaattaatgagtgacggtgttgttagcttaaatgatgcttataggcggtttaaagaaaatattgaaaatcataatattacaaagccagttatgatagtaccattggatttagatttcaatgtaaatgaatatgatttttcaagtgctgaggcaggatacgagcatgtatgtgaacagattcgaaagttagaagataaaatctcgaagaataaaattaaattaaaacaacttaaaggtatgcaaaaagaaacgaaaagtgaagtggaaaaaacaaaaaagaatattttaaaaattaaaaatgaaaacaaaaaatgtgaggatgaattattaaagttgaaaaatttatatcggaatcaagaagaaatagaggaagaataaaaaaggatctttacaatatgcttgaatgaaaaagtaaattctacattctaacacaccttgattttatgcgggattaaattctattttcggagatacacaacttaatttttttagtatataatgcttttatacggaataaacagcatagttttttgcatgataaaaggacatctggaaatagtgtgcaggactaaattccacatgtctgttggaaagactaaattctatgcaatgaaacttgcctgtgcctgtattgttattattattttattaatgctggtatcaatgtgacttcatcggctggtatctctgccaatcctaatgctttatgaagtctgttatccagcaggagacgggatacttcatatggactgtgtccattgaggctgtcccgtttttcgctgttgatatgatttaataacagcagcgttgtcttgtctgtcattttttcaaagcttgttccttttggaaggacataccttatatattcatgattcttttcaatagcacctttttgatcagaacggttgggatcacaataataaatacgtgtgcgtacttccccatttttgctatattccagactctgccggtcctgaaattcatgtccgttgtccgtaagtatcacttcgaaaagtttctggaacagttcaattccaagtaattctgttaaatgatcaaaaatcctggttacttctttctgggtctgttcttctaaaagaaacataagcataaggctacagtttcgaaagaacatagtcagaaagcagggactggtaccttttgctccttcaacggtatccatctcgactacataaacagatttgttcgctgcgatatattccagaaattctttatagctcctatcttttcggaaacttctgtctttaaggctggcagtagtttttcttttccgctgcttgtataccactttacggcgcagatctatgtttctggcttgaaaaacgccacggtttatgtaagaatatatggttcttctggaacaggcgatctcatcagcatgagatgcgtagatgtgggcaatagattgtccttttttgagaagcggtgacaacaggatgtccagtttctgtatactttccggtgtctgattgattccttctctgcttgtggttctaagggcttcataggtgtcctgggcgtattttgaagaataaatctttttgtccatcatgcaattcgttttcttgctgcatccattgcacacataaggcggtttatttaatttctcacattctcttggtttataaaatttacagacatcgctgcatctgaattttctgcagaggacacatttgtgccggcattcattatcaccgcacatatgcatgacattacatatatttgtccggggctttgaacaatcataattatttgcacagggaataggggcaaatgcatctgtacttctttccctgataatagaatgacgtctgacttctttggatatggtacttggatccttgtttaattctattgcaatacttctaaatgaatcaccgttatttaaatgctgttcgattataatacgtgcagataagtcaagatgtttttggttaccctttggtcttcctgtattcattttatcctccttctgcacaggcaggggatcatctgcagtagtattttataaaaagaagaaggaaaaatccatgcagaagtaaattctacaggtatagaatttactcttgcaaggtagaatttaaaaatacatttaaccatctttacaatatgttaaaaatgatataatatatataagaacgatcgttcgaataagagaagaagaggtaagaaaagtgaagaaaacagtttgcgaattgtttgccggagtaggtggctttagatgtggacttaataatataagaacagcggaagattatggtaaagaagaaaaatgggatacagtttggtttagtcagtgggagccggcagagaaaagtacacagtacgcacatgactgttatgtatatcgatttggaacaagattagataaaaatggtgaagatactacgaactacaatattgaagatgtggataaaacaacacttccagacttcaatttgttggtcggaggatttccgtgtcaggattattcagtagcatcgtcgttggctacgtctaaaggacttgaagggaaaaaaggaattctgtggtggtcgatacgtgaaacattggaagcaaagaaaccaccatttgtattattagaaaatgtagacagattattgaaatccccagctaaacaaagaggtagagattttggtgtgattcttgcatgttttagagatgaaggttataccgtagaatggcgagtgattaacgctgcggaatatggatatcagcagagaagacgccgaacatttatttttgcttataaaaatgatacaaaatatgcggatagaattttgaaagaaattcagtatactgagaaattggaagaagataaaaaaatagaatgtatggaaaaggcagttctggaagatggatttttcgcaaaaacattttctgtaaatagagcggaaaatgctaagatgaaagttaaggaatttccagcagaagtgggagaagtatcagatacatttcaatgtgtatttgaaaattctggaataatgaaggaaggagtaatctatacaataaaaactgtaccgaattatcatggaaaacaaataacattaggagatgttatggagactggagaagtcgaagagcagtacttcattccagaagaaaaattatattatacagattcgtctgtgacacatagtgatgaaacagagcaacgtcttccaaaagaagataggcagacttggcagtatctgaaaggtgcaaaaaaattgttgcgtacaagttctactggtcatgaatatgtattctctgagggtgcaatttctatgattgatcaagaggacaaaccagcacgtacaatgctcacatcagaaggtggatttagtagaactacgcatattgtgaaagacaagatgactggaagagtaagattgcttacagctacagaagcagaacgtattcagggattccctactgatcatacgaaatattgcctggttaataatgaaacagtggaaatgccactaagaaaacgtagatttatgatgggaaatgcgttggtggttaatttggttgaggatatggagaagacgttggatcagatatttgagaatgaataacattgctagtgataggagaaggttgaattatggcatttgaggcaaaagatgaaacggttggagaattattaaataaagttgttttttcggttccaagaaatcagagaagatatgtatgggagaaggataattgggatgagctgttagaggatatacttttctcatgcaggtctggaaaaaaagcacattttttagggagcattgttttaaaggatgaaggcaaaaaagaaggtatagctagatatactattattgacggacaacaaaggataacaacaattacgttaatattgatagcaataatgaaattatttgttgagagaaaaatgcaggacgaatttttgggaaccattgattatgtgatgaccacgaacaacagaaaccaaaaaatgccgatattaacttcggattatcatttgtctttagaaaaaattacaaatagaatagtagagcttaacagcaatgaaaatataacaatagatgcattagtgaattcatgcatattatcaccagctaaagataagaaaattggagaagcgattaaatttttctataaatcaattcatgatgaattagaaaaagaaaaagataatgcgaatgaaaaacttttagaaataagagacgcaattattgaaatggttttggttagtattatttcgtcaacagaagaagattcttacactatttttgaaatattgaatgcgagaggacaagaactggaacagtatgagttgttaaagaattatataatgagatatattgaaccagtagaaaatagagattccgcaaaagaaaaatgggaagagatggaacgagagttaggcgcgtacataaagaaatttataaatcagtatgtgtggcataaatatggcattattgatggaatgtcaacatatcgcataatacagaaaaaaactaagggaacaaatgtcaataatctgttggatgacatattagtaaaggcaaagtattattgtaagtttataaaaccaacaataggggatgatgggaattgtctagattatgaatttagaatatattctttctttaaaagcaagagacaagagcaattcagaccattgttattaagcttgttacatcaaagggaattaggaaaattaagtgaatctttgtataaacagactttggaatatttatataatttctttgtatgccatactattattggaaaggaaaaatctaataatttgcgtgatacaataattgaatatgcttgtacacttgaaagtgactactcagatgaaaagttattagagtttggtggaatattgaagaaaaaaataccaagctatgaatggtttgaaatgtcgtttaacaatttgggctggtccaatcatacagaaatttttagaaattccaaagataaggaaagagtaaagttaacattggaaatcatagagaaatttgtctcgcaaagatttgatattactgaatttacaatagaacatattttgccggattcacaaggagaggctaacgctcatataggtaatatgataccactagaaagcagattaaatggattatgtaaagacaaaaagttggaagaaaaatatgatttgtacgagcaatcgaattttagtacagcaagagggataaaacagcgttatgctggaaaagaatttaatccttcgcaaagaacaaaatatttggcgaaattagtttataataatatattggaattagaacaaataggtaatcagggcaaaaagaaaaaacagtgataacaccatgataacaaaatcttcaaaaaccacacggacacagcgaaaaattcgcattttttggcacaaaatgaacgaaaaataaccatttagcctctgcaacacgccattctgatatcgtgaaggtggacgtactgttggatcaggacgtgttgctacaatcatcgaataattttagcataacatcttaaattatatatattgagtaccgcaaggtacattgtgtccaaacgtaagataccccggaaccgcaaggtttccggggtttttctgttgcctggaaacataaaaattatgaaaaataattctatattaaaatatggatatttgatgaaatctttgctgttgaattaagaagaaccgatatatggaaaatatggaatgttgcgaaaacagttcctgaaggaacacagatcagcaaaatatcaatacttgctattgactggaaagctgacgaaacacctgaatcagattgatcaggaagccagaaagcaggtggaaatacttatggaacagatggtgaaaaaacagggtgcgacggaagaattaaaggcacaggatcagatgaagtgggttagattaatgattaatataaaatccagtgcagaagaaattgtagtgaaaaatacgatatatatgtaggtggaaataggcggtcgaaaaggatcgcttttttctgttttgtgtgtattggaatagtattttaaaatgaactatggtagaataaagtaaagacaaatcgagagcttttggataaaattttgaaaattatcgaggaagttactatgaaaaaatgtagatattgtggcaaagaattagatagtaatttggaattttgtagcagtgagtgcgaaaacagctatagaaagataattgaaaaagatagacataaaattaagtatttcatttcgggcattattttagggtttttagctatgttttatggtgttgtgtcaagccgcaattgcatgattggaagtggaattatagtaatgggggtcactgttgttttgcttccatttactacttcagaaacaactgctttatttggaaataaaaaggcgagatttattggaagaatactaggcatgatacttatagcggttggaatatgggtagggtttatttgatgacaactttagtctttagagcaaattaatcagaagttgagaggagatctctgtaatgtttatatttttatctgcgtgttcacttttagtaccgttatctatgattatattgggatatacgtggaaagataagcctcctaaagatcggcaggggagttcgggatatcgaactactatgtcaaggatgaatgatgaaacatggagatatgcacacaggtgttggggctggataaactttgttttaggaatcatcctggtgatactatcgatttttattttgattttaacgaaagatgatacaaactttgaaatgatttctgtttatttggtgtttttacaattaggaattatggtgcttacaattattccgacagaatttttgttgcataaacattttacaaagcaaggaatgaaaaaatagctaatttccaattggcggaaatgaaaatcggaagttggaggattgaattatgtggaatgaattaggtataagcggtggaaccgcaattgttattttgattgcactgtatttcgttatcaaatgggcagtgaagaatggaatcaaagaagcctacagtgctatcactggaaagaaaactgatgaagatatccaaaacgaaaaagagttgaaagaacttggattggattcagaagatcaataacttcaagtttgtggaatcgactgaaaggaagcattatatgttctatattatttttgactttgcaatggcagtgattatgcttttatttggaatatggttttataggtcaaaaggacaagcatccaaattcttgtctggttataatatgaaatcagcagaagaacgaaaaaaatatgatgaaaatgctatgtgtaaggcatatgggaagagaatgatgtttatgtcaattccttttattgctggaatgattatagatatttggcatataggaatcggttgtttaattgcatgggtgatatggtttgttatgtttattctgctgcttatggatagacataaaagagaaggttaatttatagaggaatagaatgcttttggggtgaaaataccgtttatttgttttagacatacgatgtccggttgaaaattagcggattctcgttttatgtcgtggtaatttgggtacatattggtaagctgtaagtggaagagaggtagagacatggacacaaaaaagattggagcttttttaaagcaatgtcgtaaagaaaagaatcttacgcaagagcagcttgccgagaagtttgaggtatctgcaagaacagtttccagatgggaaacaggaataaatatgccagatctcagtatacttgttcaacttgctgaatattacgatgttgagatgagagagctcctggatggagaaaggagccagactatgaataaagagatgaaagaaacactggacaaagttgcggtgtatgaaggatgggtgaaacaaaaagcattaaaggctggaaatcttgcatttgcatcaatgtttgtgattagtgtgttagcgattattattcagatgttattaactgtggatattcgcttggttttaggagagacagcaactgctttggtaggaggaatcctgtacgcctctattatggtgtataatggaatatgggataaatgtttgccaaaaagtgctactatatggcgagattttctcaccagtgtgatatgtgcaggaatttttaccgtcatctatggtgtatgcttattcagaatgggagctacagaaacacagataacacgattagcattgggatttctgattggtattactattgtggcatttattattcttaggctcttggcatttattaatcgaaaaagaaaccagaatttgtcaaatgttcaggagaaaaaggaaatttccctatctcaggtagaatggacaaaaatttataatgcacagaatatagtagagacagaacaacttgtagaaatgttaaagcaaaatggaatagcagctttttcacaggaagcaggtgcgaatgttgcaatgcatggggcacctggatttggaatatatggtgtggatatattcgtgaaaaccgatgatgcagagaaggcagtacagttgatcaaggagattaataaccaagaatgaagaaaatttttgacattttcacacatgcgtgctaatatgattatagaaaaagagtgctaccgatagacggttagtccgatatatgttttgacaaaaattgccgcttagtttaccagaccagggcggctatttttgtggtttattattatccttgccaaaggtatatccaagaccaaagcaggttaagccgaagctcactactgcaataaaatcaacaatactcatggcttagccctcctttccagtggattctctttcgagtttctatgtaatcagagggtcacagtccctctgttgaaggactaaccgcctaccgttatgatagcacccatgatgtaaattatagcagtcagggacattgtatgcaataaaaaaatacgaaacataaaagaggctgtaatgaagataaaagatgttgaaaaacgaactggaattacaagttataatatcagattttatgagaaagaaaatttattaattccgaaaagaaatcctgtaaatggatatcgtgaatatacagaggaagatattcttttgttaaatcgtataaaaatgttaaggatgttagatattccggtttcagatattagaaaaattttatatgaaaaggaagcattaaccagtgttttaaatacacatttgcttaaaattaaagaagaagaaaatagacttaggcagaattattttttatgcgaagagttgataaaaatggatatgagtgtgactgatttatcagaagagatgttagataaaatggtatctggaaaagaggaatatatttaccaattggagagaataaaacggcaggacaggatacaaaaaattttcgatacttctaaattaattgtttgtattgtagggggagtaattgcagtcattatgtgcgtgcaattatatttgaaattatgtaatacatatatgagtgctccgtttaaagtaataactcttattttgagtttgattttggtggtttcaatattacggattatagtgtgtaatgaaacaaaataagaatgcgaagatatttttgagaaaaagaggacaaatagaaaatgttctcttttttcttgaccttaaacttcctctaaggtgtatatataagaaaaacagggaggcgagagatatgtatgtaaatgtagaaaatgtaaattttgcttatgataagaagctaatattacatgatattaattttggaatgaataagggagagataacaggcttaattggtcctaatggcgcaggaaaatcaacaatgctaaaactcatgataaaaaaaatgaaacctgataatggtaaaattattattggtgataatgatatattttctattaaaagagagaataatcctgtgacgttcattccagatattccagtgtactatgaagagttgactgtttgggagcatcttcagtttattaaagcactgtaccctgagaactcagtgacagttgattcattaattcgagaatttaatcttaatcagcaccttaacaaaattccatcagcactttcaaaaggaacgttgcagaaacttatgattgcacttgcattgttgcggcaatacgatgtgctactggcagatgaaccgtttaatgggttggatccagcacaaacatataaattcaaaaatactttaaaaaatttgaagaaacaagataaaacgatactcatatctacacatttactaagtttggctgaagatttttgtgacagatatatttttttatatgatggaagaatagtcgaacaaggaacaaaggcagaaatattacaaaagcagcagatgaataaggaaacttcgttggaacaaatatatatgtccttaattggtgagggagagcattatgcaggagtacagaaaactgttatgtgtgaataagattagagaaactaaaagattaatagaaaatatgctgatacctatattgtctttggtagttgcggcagctgttgttggatatcaaattgtgattaatttttttccaataattcggaaaataaatgcatttaatcttcgaatatgttatctggtatttggatttttgatattatactcgtttggcgtttgttttattaatgttaaaccggcaattataataaaaccggcatcattattttttattcaagagaaaaagataagacaaatgatatcaataaaatatatagggttaaccttaaaggacattatattttcaatcattctttcagcttgtattaatggcattcatttgaatagaaattttctatttatattactcataatatttttgttattaaatacaaccaatttaatgaaatggaaaatatatcatgcaaatcaaagaagagatattggaatatggctgttgtttagtataatcttggtaatatcgcttaaatatttttttatgtgcattatagatataggaatatggatgtatatgctagtttatgattttggtgttctggaaataaatgctttaaagtatgaagatgagatgcaatttttggaaaaggtacgtattgctcaaaattttaataatactgtattgttaaatcaatatgcaaaagaaaaaacggtgagatatttacagagaaaaaataaagtatccaattttttatgccactttccattgatatggaaagctcaaatatctatttatagattaggcagaaattggataataatgggaatgattttgtttgcgatatgtttaggaatttacaaaatgcctttctgttggacgctaccgtttttgcaacaagaagaaattcgttatatgttatggttaggaagtatatttgccgtttttcgattgaccttacggagtatggttcaacagctggatagtattcttgaaaaagccacagacggcttatttattcctatatcggaaaatcaaattgtgaaacagtttatagttataccaattacaattatttgtggtgaaggaattataatggcttttgctgtaaacagcagtatagtgcaaatactgttaggatgtgcaatacttatatgtgcgacagtcgtgaatttttggctagaagtgaaatataaagattttcttgtaaaaaaggattttattttaagtattgctatttttttaggagcattgatacttaccaaatagatgagagatattatagtgagaaatgaagtcgctgtgataccattttgatactaaaaaatgcagagaatagagatatagcctggaaaatccacaacacaagacaataaagacacgaaaatcacagaaaataatgagattttaagaacctcacaaacgtgaaggtggacgtactgttggatcaggacgtgttgctacagttatcgaataatattcgacaagcaatgagcagtgcaaattcgcagagtaatgtccggtgggagtttgctcacacaaggacattagtcggagaatttatagggcgaacgcccagaccgagatgtagcgaagcgaaatcgaggttagcactgcggtctatataaaataaattgagtaccgcaaggtacattgtgtccaaacgtaagataccccggaaccgtaagatttccggggtttttctgttgtgtaaaaagtttaaaataaggctgtaaagaatagcgaataaattgaaaacgtaagcgacgaataattgacgaagaatgataaaatccttataataaattagtatctgaacaacagataaaatcaattaaacaaaaatcaataacaagagggaggtcattttatgtttggttttatggtaactgctgatggtggacttacaactgccggatatgtgattacagttattgccggaatcattttgttttttctggcgatttattttgcagggaagaattcagacaagaaaaagcttaccacaagacaactggtattctgtgccgtagctattgcacttgcttttattacatcttatctgaaaatcttcaaattgccgtggggaggaagcgtcactctttgcagtatgctttttattgttctgatcgcaaactggtatggggttggaactggtattatggctgggtttgcttacggaatcctgcagtttatccaggagccttatatactttcattttttcaggtgtgctgtgattacatacttgcatttgcggcacttggactggcaggattatttgcaaaacagagtcatggacttctgaaaggatacataatagctgtaattgccagaggagcttttcattctctgggcggttatctttattggatgagctatatgccggacaatttcccgaaatctctgacagccgtatatccgattttatacaattacagctatctgctggcagagggcattatcacggtgatcatcatttcagtacctgcagtgtcgaaggcactgacccaggtaaagcgtgccgcactgcagtagtttgttttgtctggcaacagggatgtgtcgttgcccggtactcagaacatttggtatagtaattttgtttagggaagtgtaagaatgacaataacgactttatgctatatagaaaataatggcaaatatctgatgcttcacaggataaaaaagcacaatgacataaatgagggaaagtggattggagtcggcggacatgcagagggccaggaatccccggaggaatgtcttttgcgtgaagtgaaagaagaaacaggattaacactgacatcatataaacttcgaggtctggttacatttataagcgataaatgtgaaccggagcttatgtgtgtgtttacggccaacgaatatatcggtgaattaacagaatgcaatgaaggagaactttactggatagataaagctgttgtgccgacacttcccacatgggaaggtgacagagtttttctggatttgcttctttcaggagatgagcgatttttttccttaaaattgcagtatgaaggggaaaaactcgtagataaacaagtaaatttatattaaccgaataaactgcgaagcagttattcggtatagagccgcgtagcgaagcggatgattttatccgcttgattttggagagataaaatgatgaattgtttggcagtagggctgggtggttttgcaggagcagtattgcggtacctgatcgggctgattcccacaggagaaaccatgatttttccggtaaaaaccttttgtatcaatgtgattggatgtattgtgatcggagcaatcacagtactggtggcgaaattgtctgttccaccaaggatgattttgtttctgaaggtgggagtctgcggtggatttaccacattctcaacctttgcactggaatcttcggatttgatccgggatggacatatgggaatagctctgtgttatgtattacttagtgtgctggtaggcgtgctggcgatttttgcagtggaatatcttactgtaagataagctgcttccatcgtaaaaaaacaataagttaagcgggcgggacgaatattcacccactctggagaaattaatcaatgaaaagaatatcgttggatgaccttcttcataccagacaggatcttgactatcaggaacagtatgaatacataatgaaattgctggaaaaaggtcagataaaacctgtaaaggcttctaagagcaatggcaagaagccggcgctttatcgcgaatactggatggtagaagaacagaaggattacagcaattatatagaagaaataaaatataccttttctaccatgatttccgtggattattatctggcgcatccggatacatatgagaaagaccgaatctgggtacttatgctgaatgaatatctgaaaaaacatgcagatgccttactgacagcggaatctctgaatgaaagaagctttgaaatatggcacagagagaaatttctggatagagagcagggaaagaagattctgaaacgctgcggactcaatgtggaggctctgaatgtatacaggacaacagagcccctttcatattatacacatacaagaaatacgccgcagaatatcctgattctggaaaataaagacccttttttcagtatgcgcaattacctgctgaatggacatacggaaatttttggtgcagaaatcggaaccctgatttatggtgcaggaaaaggtattatccgttcttttcaggattttgatctgtgtgcggaaccctatatgaaacatccgaagaatacaatttattatttcggggatctggattatgagggcatcggtatatacgaaaatctggcagaaaaatttcgcagcagatggaaaattattccttttgtgccggcatatcaggctatgcttggaaaagtagaacagataactgaacttccggagacaaaggagcatcagaacagaaatatcagtacacaatttttctcatgttttgatgaaataatggtcaaaaagatggaagctgttctggataaggatagatatatccctcaggaaattttaaatactgcagatttctgacgcagattctgacacagggaggtggcttctttgttgctgagaacggagtgaacagtaaccggcttctttatattatggagaatcttatgataaaaaataattgatttttaagagacagtctgttagaatatacctgtgaaaagggagtagcttgccgggtagattcggttcacttcttcgtcaggacagttattgaaacatataactcggaaagtgatgaaattgcgagacttttactgtgaatgcagtaggagtcttttttttatacctactgcaaaataaatgtattcccggaatctttttatatttgattttgtgagtacgtaataaaagaaagagaggtagaaatgatgtttttacaggttattattttgttggcaggttttttgtttctggtgaaaggtgcagactggtttgtggagggtgcagccagtattgcgaaaaagctgggaattccacagttgatcatcggattaaccattgtagcaatgggaactagcatgccggaggcagcagtcagtattactgctgcaataaataagaatgcaggtattaccattggaaatgtagtcggaagtaatatcctgaatattttcatcatcctgggaatcacagcagtaattacgaatgtagcgattcaaaaatccacgcttctttacgaaattccgtttatgacagtgataacaattattttgctgatctttggtatcacaggttcagaggtgacttttattgaaggtgtgattttctggatactgtttctgatatatctgggatatctgtttgtgatggcaaagaaggggaacgatcaggaagaagcagaagcaaaggataatccggtatggaaatgtatgctcctgatggtgatcggtggaattctggtcgtaaagggcagtgattttgctgtcagcggagcaacggagattgcccgttattttggcatgagtgagagatttatcgggctgacaattgttgcactgggaacatctcttccggaacttgtcacatcagtaacagcagccagaagaggaaatacaggaattgccattggaaatatagtcggaagcaatatttttaatattttgtttgttatcggtacaacagcactcatctgtactgtgccgtttgagagtaaatttattattgatactgtaattgcagttctgtgtggagcaatactctggattggtacattcagacataaagaattaagaaaaccctgtggtgtggttatgttgttgtgttatgttgcatatttcatgtatttatgtctggtataacgaataattgcttttcgcaacctccgcaggggacttacttgattcgattaaaataagaaatggaataaagtatattatggataattatgaaaaacaggtatatacaggaagagagttgtttttaaaatatgatcaggataagctgataaagaaatatggtttgaaacacgatgaagaatatctgtatttgaaatatattggaacagaatatcggatcaatcgcagaaacggtgctattgaatatgccacaggcgaagaatggacggactgcagagaatatacagttgttatgacaatctatgattttctctgctgttccgggcaggagatactgcctcctcttaccgggcagtggcagcctgtgggaaggtttgtaactgccgggagtagtccgtcaacagatccctttgtggaaaagtatgcaagagcattttccggcaaagtggaagagttaaagcaggcctgtatctgtctgggaggaaagcagacgaaacgtctggcaggggcagatctgacatttgaaatgccggttcttccggagttctctgtgttgcttcagttctgggatggggatgaagaattctcgccaaagatcttactgttgtgggataaagtatcgttatcataccttcattttgagacgacctattatcttcagggagatcttctgaaggctatactgcagataatcggctgaatacactgtagccgatccttcggaggggatatctacagatttctgatacgggatttgtgcagttacgcaaatttatactatagaaacaatagggtaaaaaccatatttaaccgaatcaagtaagtcccctgcggaggttgcgaaaagcaataagcagtgggtggggacttgcttgtatcaggaggagtgcaaactccttctgataaactgcggagcagttattcggttatgagcaagtagcgaagcggattgcgaatatccgcttgattcaagggaggcagctttgcaatacgaatttctgaaaaactttccaaaacgaatgaaagatgtaggtctgtacggtgttcttatccaaaacagtattcagaagacatcctggaaacagtttggctttctgaaatttgatgaacagatgaatcttatttttgcagtaatgctttatattatggaacagtctctgcgggaagagaactgtactatggatgacattagagcctatattgataccatcaataccagatatctgggtaaagaaatctcctatgatgactgcagaaaattaggagattttgttgtcaatgtgatcttatcaaatgaaggccgtgccatgtattttgacggctatgattttgaagagaacgattatcatattatgcatatcagctatgtggcgaaccggatcgtgtatctggatcaggaggttcgcagaacatcttattatcttacagacgacggatacaatctgatactttccacccttgaaatagaaaataatatgaagcttaccatccatgaaatgatcttccagatgcatctggaaaaacagagctatgataaggctgtggatgagattaagaatgtctttaacctgatgcgcatccagcttcagaagattcaggaagctatgggaaaaatccgcagaaatgccctgaattattcagtaaaggattacgaagaaatccttctggagaatctggatacgatcagcgatacaaaggaaaaattccagaaatacagggaactggtgcggagcagggtaaagaagctggaagaagagaacatcaatgtacgccgtctcggtgaaaaagaagaggagaacctggaaaatctccgtattattgagagctacctgaacagaaccattgatgaacaccagaaaatcctgagcagccattttgacctgaaggcactttataccagagaactggaagcattgtcgcagatgtcactgatccggagattttccatgcgcaatgatttctatgataaagtgctggagaatccgtcggcactgggaaatctggactattttttaagaccgctgttcaaccgggaaccggataaggtttataacctgaataaagccttattatatcagaaaccgtctgttagaaatgaggacgaggacactgaggagatgctggattttgacgaagatgcatatctgaaagagcaggaagagaaacacagacagaagctgaaacgttatgaaagcagtctgggatttctgttggagcaggcatctgaaaaaggtgaaatttccctttctgatatctggaaaaacattcaggaaaatgagaaaaatatagaagaaatgcagcagcagctgattccaaatgttgaaatttttaaagaaatcatggtggagctgatacggaataaagagatcaatatggaagcattgaaaaaggaacggagcgaatttatccaggatcagacagcagattttcagctcaacgaaatgctgctccagctttctgaagaaagattttcagataaaaaaatcggtaaaatagagatatacaggatagaagacggaagcacagtcacctttgacaatgttttcagcgaaaacggagtgaaaaaaagcattcgctgttctaatatcctgatccgaatcatgagaaatgaggaataatagatatggcatacgaagcagaggaaatccgcactagtcaggagatattttattatctcttggaacatcatgagctgcgggaagaagatgaattgcttttatataaggcatatgcagaagaagaaacaatcaggaatctggtgaaatctcagggtgatatcgccggctgcaatatcgaacgatacgggaatgttatttatctgattcccaaagaggagaacaatttccttggcttttccaagcagcagcttaaaagtacattgtgtaaatccggagcaacggacaaggattattatctgtcacagtttgtgatccttacgctgctggtagaattctttgacggacagggaagcagcagtaaatccagggaatatatgcgtgtgggagagcttatgaactgtctttccgcccgcctgaaggaaggggcagcagaagagactgccactgaagaggaggaagatggaaagaatcccaaagatactgctgggatttctttcaaaatcctttatgaaacttacgaggcgctgaagtctgatgacagaggttccaggatgaaaacaaccaaggaaggctttatctacaatatcctgatgttccttcagaaacagggactgatcgagtatgtggtgcaggatgagatgataaaaacaaccagaaagctggataattttatggactggaatcttctgaaccagaataattaccagcgggttctgagagtactgggggtggcaaaagatgagtaagattaatgcagtgcgtctgatcaacgtgaattataataacaatgcataccgtatcagcgatgaaactctgtattttaatggagaaagcacactgatttctctgcagaacggcggtgggaaatctgttcttgtccagatgctgactgcgccctttgtgcatccaagataccgcaataccaaagaccgattatttgaaagctattttactaccaataagccatcctttatcctggtggaatgggcgctggatcagggagctggctatgttcttacaggtcttatggtcagaaaatcccaggatatggaagaggacagaaaagagaatctggatattattggaattgtcagtgaatatcaaagcccctgtattcaggatatccaccatcttcctgtagtggaaaaaggcaaaaaagagatgatcctgaagaatttcaactcctgcagacagctttttgaaacctacaaaaaagacagggatatgaagttcttctattatgatctgacaaactatgcccagtcccgccagtacttcgataaactgatggaatatcagatcaattataaagaatgggaaaccattattaagaaaatcaacctgaaggaatccggtctgtcagatctttttgcagactgcagagatgaaaaaggactgacagaaaaatggtttcttgaggctattgagagcaaactgaataaggacaaaaaccgcattaaagagttccagtctattctggaaaaatatgcaggacagtataaggataaccgttccaaaattaaacggcgagacacgatccgtcagtttaaggaagaagcaaatgggattcagactcaggcagaagagtatcagaatgcggagacagaggaaggaaaacagcagaataaaattgcctggtttatccatgatgtaaatggactcttaagccagactgagaaagctcatgatcatgcaaaagaagtgctggaagatttggatcaaaagctttccagagtagaatacgaggagctttccagccaggtctatgattatgaggaagagaagaatcttcatatcggaaatcgtgatatgatcgatatggagcgtgaaaatcttcaggtgcaggcagaacagacagagaagaagcttcatattctccaatgtgccagacagcaggattctgtatcagaggaaaaagaggaactggatcttctcagggagaaaatcgcagttgccagacagcagggagctgatctggaaccggagagaaaagcacttggcctgaccttgaaaaacattttcgaagaacgtattcaggataacagacaacagcaggaaaacctgtctgaaaatatacagaaaaagggaaaagaagcacaggatgaggcgaaaagatccgaggaactggaagagaagatccgcgactgctttggcagaaaaggaaaactggaaagtcagatagaatcctatacccgtctggaaaaccagtataatgtcaagtatcaggaagaattagtacgaaatattctgggaacctatgaagcaggaacactggaaatccgtcgtcagatgtacgaacaggaactgcaaaaaacagtgagggaacgtacagaaaatcagaagaaatgggaagctgacaaggagctgatccgccgtcaggagcgcagtctggaggataagaaagaggccctgattcataaaaagtcagagacagagaaccaggaacatacctatcagctctatcagaatgaactggaaataaggaagaatatcctgaaatatctggatatggaggaacgccatcttctggatactgacaggatactggagaactctggccgaaagctgcgtgaactggaggagctgcggcggaatctggaaaaggaagaggattctctggaaaaagaatatttaagccttaccagcggaaagattctggagcttcctgaggagctggagaaagaaatggatgatttgggaattcacacagtttatggtatggaatggctgaaaaagaacggatactcccagaagaaaaaccagatgctggttcgtaagaatccatttctgccatatgccctgattcttacccgacaggaaatcgagaagctgggacgaaacgacagaaacgtctgcacatccttccctgtgcctattgtagagcgtgagaaaatagaagaatttcaggaaaagtacacagacaaaatcgtaaatttccctggaattagcttttatattctgtttaatgaaaacctcctggatgaagaaaagcttcaggcaatgatctgggagaaaaagaaagaactggagaagctaaatcaggctgtagatcagcgcaaaaaggaatacgcagagtattttcagcgtcaggaaacactgaaaaaccagtctgtaacaaaagaaaaatgggaagaaatccaggagcttctgaaaactcttgaggaagagaaaaaatctctggaaaaggatatccgggatgcagcgcaggagcttgacagtctgaagacagcacatgaaaagctgcagaatctgctcataaaatctgctgcggaaattgaccgtcagaaacagcgtctggaagatttttcccagttggaaaaagattatgctttctatgaaaataatcgaaatgagcttgaaaaatgtaaaaaggatgaaactcgtttccgggaaaaccagaagcttgcaaaggacagacaggaaaagcttctggaggagaaaatgactctggagcataatctgaatatgctggagagagaaaaagacaaactggatgaaaaatataccagatatgcgtcatatgaggcaggcagcagagagtcagatgaggtcaggaaacagcagagccagcagtttggatttgacagcatgtcgccggagcagatggaagtacgttatgaggcaatcacctctgttctttcacaggaactgaagaatctggaagagcaggagagaaggtctgccgcacgttaccagagggaaaaggaagatctggattatcttcagaaaaaatatcacttaaagcctgaacagtggtccggcgtgatctatgacagaaaagaagagtcacaccaggagggagtattggaagatttccgcagaaagatccagacaaaggatatgcagtggaatgatgcagacaaaaaggcagcagtggctcagagtaagatcagcgaactgacaaaaagaatccactctgtctgcggtatggagaaacctctgccaaaggatgagattcagggacaggattttcaggcaaggaaaaatcagcttctttatgagaagaaagaagagaagaagcaggaggagtttttaagcggaaagcttcgcagctatgaagagaatctgactgctttatcagagtataatgaactgattcctgtggctgcagaagaccatgagccggtttcggagaatctgtctgcggaagaattaagaaattgcaagggaatcctgatcagggattataatcagaaaatgcgggataccagacagaagaaggaagaactggtgcggacactgaataagattgtccgtatggaaagctttcaggatgatttttacaggaaaccgctggaacagatgctggagctttccgatgatgcagtgcgtgtcctgactcagttaaaaactacagtgcagtcctatgacagccttatggagaagctggaggtcgatatttctgtagtagaaagggagaaggaacgtatcacagaacttctggaggattatgtccgggaaatccacagtaaccttggaaaaatcgaccataattcaaccatcaccataagggaaagaaatatcaaaatgttaaagattcagcttccggactgggaagaaaatgcagggctttaccgtctgcggctggaagactttattgataagatcaccatggaaggcgtggaacttttcgagaaaaatgaaaacgcacaggagtttttcggctccgctattactaccagaaatctctatgatcaggtggtaggaatcggaaatgtacagattcatctttataagattgaagcccagagagaatatccgattacctggaaggaggtttccagaaattcaggcggagaaggatttctgtctgcatttgtaatcctgtccagccttctgtattatatgagacgggatgatacggacatttttgcagataaaaatgagggaaaggttctgatcatggacaacccgttcgcacagaccaatgcctcccatctgctgatcccgctgatggatatggcaaaaaagagcaacacacagcttatctgccttaccggtctgggcggagagtccatctataatcgttttgacaatatatatgtgctgaatctgatcgctgcaagtctgagaggcggtgcccagtacctgaaagccgaacacaaaagagggaaagaaccggatgagcttgtcactgcgagaattgaagtgggggatcagatggagctgttgttttaagaaaaattacagcaatcattctgtgtgtcatatcattatcgttgcaggttgtgattgcgagtgctgaagatataagaaagaatattacggtatcacatgagccggtctgtgtgatgccgtatttttatttgtccagagaaaagaatgaaagattcttttatgttttattttgctctggatacactaacaatagctatcaaaataacattgacagagcttaagaataagaatagaatataattaacaaaaataacttagatgattacaaatatttagatagaaggagagaggtttatgctatatgaatttttgaaaaacaattataaggaagcagagcctatattcttttctgatatagtgattaagggaattacaaaatctgcagtaaaccagcagttaaaaaagttatgcaatgaaggaaaactgcagaaatatgagaacggcatttattatttgcctaagaaatcacgattaaaaacaagtgtaggtgtaaatgcagatacggttgccagatacaaatatgtttccagaggtgggaaagtagatggcttctattcgggaaatacatttgccaatcagttgggaatttcaacgcaggttcccaataaagttgagattgtcagcaacaatatggctgcaaaagtaagagaagttccaattggaaagagaacattcattgtaagaaagccagtggttccggtaaatgaagaaaatgtttatgtgctgcagttacttgacttattaaagaatctggatgtgtatctggatgaaagctatgatgtggctcatgataaagtatctcaatttgtgcggatacatggcatcacaaaaaaagacgtggatagttatataagagagtttccgattgcaatatttaaatattattatgaattgaggttggatgatgtatttgcataaagatgataaggaattgttgagggatattattgtaacggtatcagagcgaacgggcatagatgaaagtatcgtggaaaaagattattatgtgacaatgatattaaaagaacttgtacagagaaatcctaatgtggtgtttaagggtggaacatccctttccaaggcttatcatgctatagaccgtttttcagaggatattgatattacatttgaagaacatttgggagaagccagaagaaagaaaatcaaatatcagttattacaaccaattagcgaagatttagacttagcaattgataattggaagtttattgaaagcgataaggactataatcactatgatttcttatatgattcagtttgctcagaagataaaagaggtctgcgaccatatgtgaagctggagacagcattgatgtcgtattcttatccaacagaagaaaaggaaattacaagtataatatttgattgtctcgcaacagaagaagcggagattttgagagactatgggttagaaccatttaagatgaagacacaggcactatccagaacaattatagataaaatttttgctgtgtgtgattattatatggtaggaagagcaacgagaaattccagacacttatatgatatctttaagctgaaaaattatatttcaatggatgatgatttcaaaaggctctttgcagatgttagaaagcacagatcaggcatggatattaaaataaccccgtctgccagggaggatgttgatctgctggctgtagcagaaaaactcataagagaagatttttatgctgatgattatgctgattcaactatgaaattgatttctgacaatatttcctatgaaacggtaaagctgaattacattgatttggttagaagtatattacgataagagaaaattttctctcgaattctgttgagaataatgcaatttcaagtcaattaatcataataaacgggggaaccgctaaacaaaagtttttcaggttataggagaacagttcgaatatataatcggctgttctttttttagcgttaaagcggcgaggtttttcttgtgtacagtggaatgtaggagtataatgaaatcaatattttgcataaatttacaatctgtaatagaacgacgatcggcaaagcagatgaaagtctgtgacgcaaagctaaagggcctgtaaaatggcagccagttgtatgaaatgatgtgcgctgtctgtgagacggtgtttttttatgttataggaaattactccgtaatgttcctataacataaaaaagccctccgggcaggatcgcactgcgacggaggggaattatgtcgctgaagcgacccttcgcaggcgaagaatcctgcaagcagggatgttatttcataaacggaaccataatgattttatcggagaagagagaaaaatatgaaaatcaaaaaagtacaaagtgcatgtcttattttggcatgtatagcggcaacaggacttatagggtgtgggaaaacagatgaaacaccaaagaagcacgaagcaattacttttatggctccttatctggaagtggacaattttatagaagaagtgcataaaacatatccagagattgagcttgaagtagtcccgtacagcggagcaaatacaacaacctgtctgcagaatatgttagaggcagatgatcttccggacatctgcacacagactttttataagccagatgtggtggatgtcagtgataagatgattgatctctcaggatacgattttacagataattatgtggaatcacgtctgaaagatgtatccgatgagggtgcactttatatgcttccatctttgtacaactgttatggaattacctataataaaacactgcttgagaagcatggctggaagctgccaacatcttttacagagcttgaagaacttgcagacaaggcaaaagaagcaggagttacgttatgtatggcacagattcagtatcctggttcagccttccagtatatatgtaatattgcggatgcgggattccttggtactatgtctggaaagcagtggcagaaagattacctgtcaggaaaggcaaatgtcagtgacacggaaggcatgatggacagcatggaatatatccagaaatggaaaaatctcggtatgcttgactgcagcaacagtgatccggtagatgatagtaaaacaagagaagcttttataaagggaaattcactgtttctattgggaccacagaatggcattatggaatcagaagatacaacggacaaatttggtctgatgccatacctgtctgaagatggaagcaagaatgtatttattttaaatgtaaaccgtttttatggattgaataaaaagctggagaatgatcctgagaaacttgaagatgcattaaaagtcatgaaggtgctgtctacggtagaaggaaccagtgccctgtatccggacagtacattaaaagcaggactgcttcctttcaaagatgcaaaggcagatgacaccttctatgcagatatttcggattttatcaatgcagggaatacgacaccgtttatttattccggatgggaaaatacgattgtaaataccggaaccaaaatgcaggaattcatgcaggataaggcatcaataaaggatgtggcagatcagctggatgaggatcaggacagcgtggtaaataatcagccggaagtgatcacaacagctacagaggaaatttcacaggaaagctgtgcaaagctggtgggcagatgctttgccgaggcaaccggaagtgacgttgctcttatatcccttggaacatggatcagtggaaatggtacgaaccagaacaatgatggtgtgagcggagaactgtatgcaaagaatattacagactatgatgtatgtatcattcttccgactggctggtcacagacgattaaaacaatcaggctgacaggaaaacagattcaggcattgtatgaagaaggttatgatgcagttggtacaggcaagaattatccatatatgttggtaaatcctgaagatatggaactggaggatggaaagacttatcaggttgcaatttccggaatcagtgaaaaactggcatcggaaacggaagtgacagacagtggtattgtaggtatggatgcggcaaaagagtattttggacaatttgagactttaaatgaagcagacgctgaatggaaataagcggaggggaaggatgcataaggcaaagaattaccggaacttaatattgggttgttgtatgactggtatagcgatgtttcttgcattctttttcctgtatcatagttatatccaggatattatctatgaagaacgattaaaccagatggaagagattacccgtcagatgtttcaaaatctggaggatgtgattgattcaaactgggaccgggtaacggaagaatgtaattatctgagagatgcaaacgtacagactacagatgaactctgcagacatatgaaaaagaaatatgaattatcagcatatgcagatcataagatcacgttgatggcagtggattcagaaggtggatattatacagaatccggaaaaagaggacttttccgggatctggactattttgaagaaagtcctgaaaagatcagttttgtttttgattccatgacggataatcagtcagagatggtatttctgaatcgtctgccggagcccatacatcttcaaaacggagaaaagaaaacttcaattctctattttggaattgcccaggacatggaacagctaaatccatattttaactgcgaagcttataacggaaacaacagtgtgtatgtactggatgataatggatctaaactgtccaacagcaatcaggtggaactgatcaagggccataatgtattttctgttttacagaatatgaagtatcttcacaattcttcctttgagaaaacaaaggcggaactggaagaaaaaggctgcagttattctaatgcagttctggacggaacagaatatttttacggattaaaaagaatggaaaatgccgaatggacacttatctttctggttccggcggagtatgttgctacgaatacattaaaacttgtcaattttattatggtatttatcgttatctttacggttatcgtagctgcctgtgttatgatggggatttcctttgttatgtacagaaatcagcaggaagcaatccgtttggaacgggaaaataatgccaagctggaaaaagtgaatacaaaactgcgtcaggctaaacaggcggcagaggatgcttttcaggtggcacaggaagcgaacagatccaagagcagttttcttgccaatatgtctcacgatatacgtactcctatgaatgcgatcattggtattacgtccctgatcagacatgatgccggtgataaaggcaaggtaatagagtatgcggataaaattgacacttcatcacagcatctgttagggatcattaatgaagttctggatatgagtaagattgaagcaggaaaaactgtcttcaagtattctgatttttctattctggatttcatacaggagcttgatactatatttcgttctcagatatatgaaaagaagcagactcttacaattacaaaagaaaacatccggcatgagtgggtgaatggggatcaggttcatctgatgcagattttcagcaatctgctgtctaatgcaataaaatatacacaggaaggcggagaaattcagcttctggcagaggaatgtgaatcaaattcatctgtttatgcaaagtatcgctttttagtttgcgataatggtatgggaatgtcggcagatttcaaggacaggatttttgatgcctttacccgtgcagaaaattccctgacaaataagatacagggaaccggtcttggaatggcaatcaccaaaaatctggttgacttgatgggcggaaccattgatgtagaaagtgaaccgggacagggcagctgttttgaggtttttatggatctgaaaatcgcagaagaaagatctgtttctccggcttcacaggcagaaacagaagagcaggatggcaatatcctgaaaggaatgagattcctatgtgcagaggacaatgaactgaatgcggagattctgacggaactgttaaagattgagggcgcagagtgtacaatctgtgaaaatggtaaaagggctctggagacatttgaacagtctgttcctggtgactatgatatgatcctgatggatatacagatgcctgtcatgaacggctatgaggcgacgaaggcaatccgcagaagctcccatgagctggcaaagacaattccgattattgccatgaccgccaatgcattctcagaggatattcagcattctctgacggctggtatgaatgcccatatttcaaaaccggttgatatgaagacgctggaaaagacaataagaagcataaaatccggcggcggggggggggtaccgaaacgcaggtcattgctcagtaaccattaaataataaacccgtactctaaagaataataagaaagcaaatatcccaatcgttgccatgaccgcaaatgtatttgaggaagataaagagaagtcatttaaagccggtatgaatgcacatattacgaaaccaattggtacaattatagaatcaaatcagacgatggaggaatgtctatgtcgctgatacaggatatgaaaaaacataagaatctgacggaacgggaacaggatatccggaagtatattctggaacatccggaaaagattgaagagatgtcatccagagaacttggtcatgccacatttgccagtgcggcgtcggtgacaagattctgtcagaaattaggaacgaagggattcccggaattcaaactgcagctggtcagggaattacaatatgaaacgattgaggaagaagaagtcataacgatgtctgaacgtgagaacgttgtaacgatggtgagaaaggcaacacaggttcagaggcaggcaattgaagaaacaaagaaggaattgtcgtatagtcatttggtaaagatcggccgtatgatcgcagatgcatcgtgcgtggacttttacgtatatgatatgaatgtgtatctggcagattatggatgttcacttttcttccatgcaggaaaagtggcgaatgtccattccgcgacgaatattcagggactgcatgcagcaatgccggcagatgggcatgtagcgattctgatcagtcatacggggaaaaatgaacgactggcagagattgccggaatgctgcgaaagggcggtacgaaagttatcgtaatctctgcagtgcgtgacgggattgtatcaaaacaggcggatgagttcctgtatgcagcaggttctgagaaagtagaagagttctggagttcaatgttctttgcttcgggaaaatatctgctggatatcttatatggcatggaattcagcaggaaatacgatgagaatcttgcattgaataataaatatgaaaagtcgggcaaaaagttgttatggtaaatgttctggatcaatgtcgggaagtgataccggaaatgtaaattttgatataggcagatttcgcaaagacatgttgtgcaatatatacaaaaacaacatgtctttttttacgcctgaaacattgtttcgagaaagataaaaaacaaaaagaaaaatatgaaacgatttaacagaataaagcaaaagaattgtaagaaaacgataaattatttatagtgtacttgtcagatagaaagagagatacatgcatgtaaaaactcttaaacaaacatacagaggtatacagattccggaggatacagggatcagaaaaaggaaaaggagagtttcatatggcaaaggtaagagattatcataagcttgccctggatatcatcgatgtcgtgggcggacagaagaatattgtaaatgccacaagatgtgcgacaagactccgtctggtattaaaagagacgccggaaggagcaaaagaaaaagtatctgcactggcaggagttatcacggttgtggaaaataacggacagttccaggttgtaatcggaactcatgttggagaagtctatgattcggttgcagaagccctgcatctggatgcatctgcacaggaaatcgaacagcctaagcagaacattgttaaccgtattatcgcaacgatgtctgcagtatttgcaccattcgtatacattcttgcagcagcaggtctgttgcagggagccttgatcctgatcacgatggcggcaccttcatttgcagagacaggaacttatgaagtgctgaacttcatgtcatggacgccatttacatttttaccaatcttcattgcgatcactgcatcaaagcattttaaatgtaatacatacattgcaatcttatgctgctgtgcactggttaaccagtcatgggcagatatcgcagcaagaatcgcagatggtgatgtggtaagattcttaggtgtgaagttatcagagacaacttatacatctaccgtacttccaccactgcttctggtatgggtactttcttatctggagcattttatcgaaaagaaacttccggatgcagccaagccgcttttgacaccactgatctgttttgtggtcatggttccggcaacgatcatggtaatcggacctgcatctgcgattacagcaaatgcaattgcgaatggttacaatgcattagtagcttttgcaccggcactggcaggagcgatcatcggtggattatggcaggtagtcgttatctttggcgtgcactggggaattacaccggtcgtacttgccaacttcgatatgaatggctgtgatacattccaggcattccagacaatcgctgttgtggcacaggtagctgcagcattcggagtatttatcaaatccagaaataaagaatttaaaggtgtggcactttcagccggagtaacaggaatcttcggtattacagagcctaccatctatggagtaacattaagacttaagaaaccatttatctgcggatgtgcaggcggtgcagtcggagcagttgtaatgagtttcttccattctgcatactacgcatatgccggacttccgggacttctgacaatcgtaaatgcaatcagcaaagatgcaccgatgtcctttatcggggaggcactggcatgcgtgattgcttttgtgatcacgatcgtggcaattcagattgtcggatttgacgatccggttgatgaagcagaagaaagtgaagaagaaacaaaaaaaattacagggacagagatgctttccggtgaaaaacaggagcagaaggaacagacagcagagatcaaaaagattgagagcccacttgcaggaacagtcattccgttaagcgaagtacacgatgaggtatttgcaagtgagatgatgggaaaaggatgtgcggtcattccggaagaaggaaaggtttatgcgccgttcgatggtaaagttgtcggattattagacagccatcatgcagttggaatggaaagtacagacggagtagaaattctgattcatgtaggtatggatactgtaaaactgaatggaagatgctttaccatccatgtagaagaaggtgagcaggtgaaaaaaggacagcttcttctggaatttgatattccgggaatcaaagaagccggatatgaagtgactacaccgattgttgttacaaacagtgacgaattcaatgatgtagagatgaaggcagaaggacaggtaactgtcggagtggagcttcttgaactatcttaaaaaatatagaaaaaagagtgcggaaatctttgaaaagatttccgcatgaagtgcaggaggaagaattatggcattaccagatacatttttatggggcggcgcggtagctgccaaccagttagaaggcggatggaacgaaggtggaaaaggcccaagtgtcattgatgttatgactggcggaagcgcaacaaagatgcgtgagattacagacggagtagtagaaggaaagtattatccgaaccatgtggcagtggatttctatcatgaatacaaaggagacattgctctgatggctgagatgggattcaagtgtttcagaacaagtattgcatggacacgtattttcccaaatggtgatgaggcagagccgaatgaagaaggtcttaaattttacgatgatatgtttgatgaattgttaaaatacggtatcgagccggttatcacattaagccactttgagatgccgtatcatctggctaaggaatacggcggatggatcaaccgtaaggtgatagatttctttgtacgttatgcagtaaccgttatggaacgttataaagataaggtaaaatactggatgacatttaacgagatcaataaccagagtaatacatcggcagacatctttggatggacaaattcaggagtgcgtttctcggaatatgataataagaagaaagccctgtatcaggcagcacatcatgaactggtggcaagtgcactggtggtgaagaaaggccatgagatcaatccggacttccagatcggatgtatgtgttcattcgtaccgttttatccttattcctgcaacccggatgatattatggttgcaacagagtgtatgcatgagagatattatttctcagatgtacatatccgcggccattattcggcattcgcaaagaaggaatgggaaagagaaggtacaaaaccagtgatggagtctggggatgaagagattctggcagaaggaaaatgtgattaccttggattcagttactatatgaccaatgcagtgaaagcagatgttcagaaagatactgcagaatccctggacggaagttctccaaattcaattgccaatccatatgtaaaggcaagtgactggggctggcagattgacccggtgggactgcgttatgcactggttactttatatgaacgttatgaagtacctttatttatagtagaaaatggattcggagcaattgatattctgaaggaagatcatacctgtgatgacgattaccgtatcgaatatctgaaagaacatattactgagatgaagaaagcggtagagattgatggcgtagatttgatgggatatactccatggggatgtatcgatctggtatcatttacaacaggtgaattaaagaaacgttatggttttatctatgttgataagaatgatgatggaaccggaagtggtaagagatataagaagaaatcctttggctggtatcagaatgtgatccggacgaacggagaagagctttaatcagttataatataaaaagaagatgaggactgttatttacatatgcagatgtaaaataacggtcctttattgaaaactaataataacttaaaaacttgattttaacaaatactaagttaaaatgaaataaattaagttaaaaggagaatgagaaatatgctcacaagcgtattcgggatttctataaaatatgaagcatggaatcaacaggattctttgcctgtttatattgcagggagttatgatttttgcacagcatatacagtatctggtacgttgtagctgtaatagctgtgggtatgttggcagtgtctttgaccaaaggaatattgcattataaagtcaaacaggtagtgtaagtatccgcagtcatagttattatttgtagaagaaaagtcgataatcagctacatggtgtccaaacgtaagatatcccgcaacagtaaggtttctggaggtttttctgttgagaaaatgaaaatgaaaaatcgcatatagaaatagaattcccaaaagaattatgataaaataaaatcagtattgatgattcacagagtaaaaagcataatgacataaaattgttggtgtttatgagcaagtagcgaagcggatgattttatccgcctgacttatgaggtgacagtatggggatatatctgaacagtatttcatcctattctttatacaaaagcgaatataccagaccttattttgtagataaatccagtctgttgaaggaattgattccactggcagagcagggaaatgcacatatatgtattacccgccccaggcgatttggaaaaactgtcatggcaaacatgattggagcatttttcagtaaaggtgttgaaagcagtgatgtttttgacaggcttcagatttcagcagataaagattacagaaaacatttgaatcagcataatgtaatttatattgatttcagcaaaatgccgggaaattgtaaatcctatatggaatacattacacgtattgaggaacgtttaaaaagggatcttctgaaagtatattctgaaatagaaatatatccggaagactctctgtgggatattttagagagcattttcatcgaatataatggacagaagtttattttcatttttgatgaatgggactgtatttttcataaaaattttgttaccgaggaagacagacagaattacatttcttttctgagcaatctgttaaaagatcatgcctatgtttctttatcctacatgactggaattttaccgattgccaagtattccagcggttctgaattaaatatgttcattgaatatacaatggcttcagaagagaaattcagtgaggattttggatttactgaatcagagacagatatgctttacagaaggtatctggagatatgcagaaatgaagagaaaacaccttatgtgaccagagagggactggaaacatggtatgacggatactatgctaaaaatggagagagaatgtacaatccaagatcagtagtggcttctctgacaaacaataatcttgacagctactggacaagttcaggaccttatgatgaaattttctactatgtaaaaaataatgtagcagaagtaagaaatgatcttgcagttatgatatcaggtgaaggagttccggctaagataaaggaatacgcagctacgtctatgaatctgacaaccagagaggaaattctgtcagcaatggtagtgtatggtttcctgagctattatcagggaaaagtttatattccgaataaggaactgatggacaaatttgatgaaatgctccagaaagaagcctctttgggatatgtgtacagactggcaaaagagtccgaacgcatgcttaaggcaacacttgaaaaagatacttctactatggaagaaatactggaatatgctcataatacggagacgccgatactttcttataataatgaagtggagttattttctattgtaaatctggtgtatctttgtgcgagagacagctaccgggtggagagagaggacaaggcaggacttggatttgtggactttattttttatcctgaaaatccggcagatacaggcattattctggaattaaaggtagaccatactgcagatgaagctgttcagcagattatagataaaaaatatagtttacgcttttcgggaaaagcaggagaaaaggcaaaatacacaggagaaatccttgcagtaggaattggatataacaaaaagacaaagaaacatcagtgcagagtgattactttacggaagggcacgttatattaattcttgtataaggtggaaaatagaggatataagcggctgtatagaaattttatacagctttttttatgtataagtttggtgaactttttttcatcatttatggttatataaattttcctgtaacgtttcttctgtctgtgacttagttatatagaaagacatcagataaaataatgatacagcagacaggaggatcatcatgaaacgatatttaggaatattcattctgacagttatggttggtttatcaggttgtgcatctgatacagacagtgatactcaggtaagcagccgtgcatattcaatgcagatgaaacaaaatcagaactgtgttcagacattcaatggaagaagacagatcaggtcgtcagatggatctatgtggacaccgccggcagggtcatatcaggataaagatggttatattctggataaggatggcaccacaatcggccagacagggccattaaaaatcccgaaagatgcagtaggataataaaaatacaaggagcaggaatggagaaatcagaaatcgaaacaatctaccgtaagtatttccatgatgtctttctctatatccgggcactttccgaaaatgaaagtctggcagaggagattacccaggaaacattcctgaaggcaatgaataatattgagaaatttgatggccggaaggatatccgcgcatggctatttgtaattgccaagaatacatatttccgctattgcagacgaaataaaatctatgtgggcgaagaattttcagaaataatgcaggattccatgcaggatacatccccggcagtactggatcagatcgtgcaggatgagacagttcgaaatctcaaacgctatgcagaactgataccggaaccctacagggaagtatttcacctgcggatatatggtgagctctcctttgatcagatcggaaaatgctatcagaaaagtgcagggtgggcaagagtaacctgccaccgtgcacgccagatgataagagcacagataagccaggaggaaaagtaacatggaaaaaataaactgtaatgtgatccaggatattctgccattatacattgatgaggtggtaagtgatgacacaaaagaacttgtagaagaacatctgcaaaactgcgaaatctgccaacgagtatatcatgagacaaaggcagaccttgaaaatgatatgaaaatctctgcacagacaaaagaaagcagccatgaagcaaatgatctgaagagtttcagaaagtttttaaagaaaagaaagataaaaacaatcctgctttccatagcagcaaccatagtttgctttgtggcagtgttcacttttatgaataaacatgttacatatatcagctacaaagatgcagggataactattgttgaggataataaagatgaagtaaaatataaaacgaatataaaaggcaattatcgctggagcacatctttggacaggaaaacaggtgtaatgactatccattttgaacagagtttgtgggaaaaatatgtaagctgtattttttatccatatgatcatattcatgatattttgaagaaagatgagataaaagaagtatatgtagataaggatggaactacaacaacaatctgggaagctccggaggaagaacagaaggcttatttatctgaagaacatacagagccgttaggataaaatattagagtatttttcaaacacgatctaaaatatgaaagcgaattttatagcagtcctataggttataaggatttacaaaggggttgtcatggaaggcagcctctttttgtaattgctgatggacattctcttcccatatgttacaatagaacaagaatatggaaagaaagacaggaaacctaactatgaaaaaacaactaaattatgcagatatcataaaggaagcgctgatcctgacaggtgcggtagcaatcattgcggcagcagtttatttcttcctggtgccgagccatacctctgtaagcagtatctccggtcttggtatcgtgttatcaaactttgtacctttatcattgtctgcaatcaccatgattttgaatgtggtacttctgatcattggcttcatcacctgcggacgcgaatttggcgtaaaaacagtttacaccagcatcgttttgcctttatttctcggattatttgagaaagtatttccggattttggctctatgaccaacagtcaggagctggatgtgctgtgctatatcctggtggtcagcgtaggactgagcattctttttaacagaaatgcatcctctggcggactggatattgtggcaaagatcatgaacaaatatctccacatggaactgggaaaagcaatgtctctttccggtatgtgtgtggctctttccgcagcgcttgtatatgataagaaaacagtggtgctgagtattctgggaacatactttaatggaatagttctggatcactttatctttgaccataatattaaacgtcgtgtctgtgtcatcactcagaaagaggaagaactgcgtaaattcattatcgaagatctgcacagcggagcgacaatctatgaagcaacaggtgcctataatatgaagaaacgcaatgagatcatcacgatcgtagacaaaatagaatatcagaagctgatggcttacatcaatcatgaagatccaaaggcttttgtgacggtttacaatgtatcggatatgcgctatcagccaaaactgtgagaaatattatggcaggaaagctgtgggtatgctaaaatagcagagtgattatataaccataaagagattatggtagaaagaggatgaaagatgaaaaaaggaaaaggaattgccctgcttcccataggtgtatttcttgtattataccttggactgggcattttgtttgagtatgtgatggaaatccccatgggattttataatgtgccaattgtagtagcatttcttgctgcaatcctggttgcctgtctgcagaacagagcactggattttgataagaaactggagattatggcacagggagtaggggacaaaaatatcatcactatgcttttaatcttcctcgcagccggttcctttgtaggggttgtgggaagaagcagtgctgagagtgttgcatattgtatgctgagtctgatacctgccagattttcagtgtctgtgctgtttatagttgcctgttttgtgtctgtggctatgggaacctctgtgggaaccattacacttctgacacccatcgcagcagcagtttccacagcatcaggatttgatctggcattttgtgtggcttctgttatgggaggagccatgtttggggacaatctttcttttatttcagatacgacgattgctgcatgtaatggtcagggatgtgagatgaaagacaaattcagggagaacttctggatcgctcttccggcagccgttgccacactgatcttaatcctgatcctgtcatttcagacagaaatccagggccgtgtgatccagccctatcatctgactcaggtaataccgtatgtgctggtattgatcggaggaattgttgggatcaatgtgtttgtggtattgctgacaggaatcgtatccggagcatttattatgctgatcggaggacataccgcacctgtagagatcctgaaaaatatgggatccggtgtatccggaatgtttgagacctgtatggtggcgattctggtagctgccatgtgtgcgctgatacgtgagtatggtggattcgatgcgcttcttggctggatccataaaattttccgcggaaagaaaggcggacagcttggaatgggacttctggtaggaactatggatattgccactgccaataatacagtggcgatcgtaatggcaaaccctatcgcaaaggaaatggcagaagagtatgggattacaccaagaaagacagcttccatactggatactttttcctgtgttttccagggagtgattccatatggtgcacagatgctggttgcaatctcagcagtgaatgaactgggtggtgagatttctgcatttcagatcatgccgaaattattttatcccatgttattgctgttcagttctctgatcacaattatgagaggctcagaccgtacaggagcttaaaagattccccctgccggaagctatatttttttcaatttctttcaaaaaatacttgaccttcctccttgtggaagcagtataaaggaagcacagacagggcagtagagcagcggatcagctatatctgctgtcaggaaagcaagaggtagcagtatgaagatcaaacaggtggaagagctggtaggcatcaccagaaagaatatccgcttttatgaagagcagggtctcctgaatgtggagcgtgcagagaacggataccgggaatatcatagggcagacattgccagacttcaggaaatcaaattattccggaagatggatatttccatagaagagatgagagctctttttgaaaaaaggaaaagcctgcaggtctgtctggaacagcacctgggagaactggaacgccgcagggagggccttgtgaaaatgcaggaaatgtgtgagcgcctgatcgcggagcatcagtctctggataccttgaatgccgagaactgtctggaagaaatcgagcagatggagaaagagggtgcaaggtttatggatataaagaaaacagatatccgtaagaaaagaaggacaggagcaatcattggagcagtggttatgatcttgcttatgggatttaccatagggcttatgctgtgggcaaatacacaagatcccataccgaccggactgctgatatttctgatcgccataccggttgtgatcatcggaggaattctggcagcacttgcaggacgcatgaaagagattgaaggaggagaagaggatgaagcttctaagtattgaatatattccgggtgtagagtttgaggcactgggaattgtaaagggaacagttgtacagacaaaaaatgtaggaaaagattttatggcagggatgaagaccctggtaggcggggaaatcacaggttatacggaaatgctcaatgaggcaagacagattgccaccaagcgtatggtagatgaagccaaagagatgaatgcggatgctgtgatcggtgtgaaatacggttcctcccaggtaatgtcaggggcagcagaagttattgcatatggaactgctgtgaaatataaataaatgacaggatgccggcggcatgagagatttgccgccgacatccctgaaatatgatcttacacactgtctgaaaagtgatatcaccacagatgaaaggtaacaatatgagcgataataagaatgtaaatcaggataaaggtcttcagggaaatgaaaaaatagagcaggcgatcgctgctctgcagcaggaagccactcaggaaatgctggcacatacactgactgtaatccgtagacgaatgagagaaaagggtcagtttatcctttcagtagaaccgcccacaggagacaaccaacttcggatcggcacagtgaaaaccggagatggaaaaatctggtgggcggcatttaccggctttgaggaagaattgaaaggcggcggaagcgttcagtccacttttctgacagacatagatcagctttttcattcagcattacaggtaaatgagattgagggaatcatcctcaacccatggaaccggacgatcatgctcgataagaacctgattaatattatattgggaaatatatgaagctatgtaaagaactctcatgttcagttaaataaaagtcctcattgtttatcctttttacaatttctgcaaagttatgcgatagttaaaaatggataaatactgaggacttttctgcttatcgggagtttcccattttgttcaattcaggcaatattgtaaccagcatgataataaaacacagagaaccaccgatcacattggataccggttctgccataaacacgccatctgtgcccatgtgtaatccatagggcaggaaataagtcagcggaaccacgataaatactttacgaagcagggagaaaaaaatcgcctgcttttttttatttaatgatttaaacactgtctgaccaatatactgcagatccataaaaataaaggctgcaaagtaaagtttcagtgcaggaactgcatcctttaatagcagtttgtctgaactgaagatcccaatcagaaattcaggggcaatgagaatgacgttccacatgatacctgtatagatcagaaccataatgatcagaacaacccctgctttctttaccctgtcaggacgtctggctccgtaattgtagctgagaacaggagaggttccctcattgatcgcatggataggcgtctccaccatctggcgaacactggatataatagtcatgacagagatataaatatcaccgcctgtcacggaaagaacattattgcagcagatacttaccaggctgttagtcagctgcatgataaatccagcagaccccagactgatgatatccctggcatgtctggtgcactcagaaatctcatttatatgaatccatcttaccttcaattctgattttccatgaagaaaataaaatacaagcaaggcagagagaatctgagagatgacagtagcaatcgctgcacccttaatccccatatccagaacaaaaataaaaatcggatcaagaataatatttgccactgcaccgactgttactgatagcataccgataatggcatatccctgtgcattgataaaaggattcattcctgttgctatcatggaagggagagtacccagaaggtaaatcatcagatagggatacgcataaaccagagcatcatctgaagcaccaaacagagtcagtaaggggcgggcaaaaagaaatccgatcagcatcagcacagcagcacttccacataacatggtgaaagcagtattcatgatcatgtcagcagtcctggaatctccttttccgcggttgatagagaaaattggtgcacctccggaaccaaagagattactgaaagcagtaatgatcatgatgatcggaaagcataagcccacagcgccaagtgcagttgttcctatatcatggatcctggcgatatagatacggtccacaatgttgtataaaagattcaatatttgcgctaccagcatgggaagcgcagcgcttaatatattgttggtcacagttccgttttcaaaatcaattcgtttcattataaatcttcctaagtttaaaacttttatcgtgcatataagtatatcataaagtaaacagaaattcactctgatacagtggtgttggaacaaaatagttactgttcactccgttcacagtaacgtagccaaaattcattccagattgcctgcggcaatggaattttggcttgtatgtctcgggattttggcatattcatgccaaaacacctcgcgggacagtggcatgtgaacagtaacacaaaatattctctgaaattgtcataagtcatgatacagagaataaaaaagcattttttatccatactattttcatgtaacaaaatacagtatttcttaaaaaaggagacaacagactatgattttaaaagaaaaggaacgttcagtaatcgaagatcttcagacacaagagaaaagctgtgtggaaaagtatggaaaatacgcagaacaggccagagacccggagcttaaaaatcttttccggaatatccagcaggaagaacagaagcattatgagtctttgtcaatgattctttccggaagtgtgcctgaatgtaactgtaatgacagatcaggcagagactatcagccaaaagcagtctatacagccatgagttcaccggaagataaacaacacgatgcgtttcttgcaacagactgtattggtacagagaagctggtgtcaggaacatacaatgatgatgtatttgcctttggcgacagtggtgtacgcaagctgctggcagatatccagattgaggaacagaaccatgcagagatgctgtataagtataaaacagtgaatggaatggcataagaagtcttaaggcattgagcagagtagcatattgggaaaattctataccaggactgctataattacctgacaggagacaattggttttgactgtctcttgccaggtacatcttattttataaaaaacatgatggtataaatgttgggatattttatgaaaaattttgtaaaatttgtcatgataaaagccataagataattgctagagcgtgttgaaaaaatcattcccataatctgcacgccccactttgcgatatattttgtccgaatttggtttccgtaacccgctacgatgcccttattcgaacaaaatctcccataaattgtgacgcacatcttgtggaaagcatttttcaaacacattctaggaattccgattagttacgtaaggtgtaatagtgaattttggcaggaatgaataagaattttttataaatacttgaatgaatatagtaaatataatacactactcattagtagtatattatttatatttgttggagtatttgtattggattttttgggtctgataatattaaaaataatttatttgcagaaggtatatctctagatgatgaatttcaggtatcttctaagtgaagtcatgaaatcataaatatttggaatttgctgattcattacttgaatcgttgtttcttaatgtttgacaagttctaagtttaaatatctcatcgtgtacgctcgaacaaattttaaacttgggaatttaatatcataatatgaaagtgtggaaaaaatggcagggattaaagatgttgcaaaaatggcaggagtaggtgtgggaacagtttcaagaatgcttaatgacagtggatatgtttctctggatacgagggccaaaatagaagctgctatgaaggaattgaattatacaccgaatgaacttgccagaaatctgtattataaaaaaagtggtataattgcggtacttgtaccgaatgtatccaatcctttttttgctgagtttgttgattgtgtagaaggggaactgcgcaaagccggcttcaaaattatgttatgtaacacattgaaagatgtaaaggctgaagctgaatatctggatttgctgaacagacatattgtagatgggataattgcgggaatgtcttctttggatgaaagtgagtattctaaaattcataagccgattgttgcgcttgacagatatctgggagaagaaattccggtagtagctgtggaccataaaatgggtggacgcctggcagcagaagtgttgctgcgtaatggctgcaaaagaatacttcatttcagaagtacagcagaaaaagagtctttatatcatgatcgtcatgcagaatttcaaaaaattatggatgagcagggaatagaaacctattgttatgatctggactggcggcgtttggatattcagtattatcatcaggttgcagaagaagttatggaaaaaaatctgaaatttgatggtgtgtttggtgtagaccgactggctattgaatgcatgaatggattgctcaggcaacacaaaaaaatcccggaagaggtaaaaatagtttcttatgatggaacgtatattacagaattggtagaaccgcaaataagtacaattgttcagcccattgacagaatggcagaggaatctgtaaaaagcctttgtgagctaattaatggaaaaaaagtgaaaaataaaaaaagtattttaatacctgaattccgtaaaggcggaacaacagtataaacagacgtcatacataagttgtgcatttgttacaaaataaaggatgaaaaacaaagacaagtacaaaatatttggacataatttataaaaaaaataaaaaacacataatcagattgacaaaaactataaaaaggttatgttaaaattaacaagacgaagaaaacaaataaattttttaagcaatgtggaacgcgttccgcattgcaaaacaaaatctgttttctcaatgttaacccgtaaaattagattactccggagaatatctaaagcggttgaagcagtatgtaaatggaacggcatgatatttaatatcatggaatttagaatctttaagaataggagattaaaaatgagaaaaaagattgttaattcattaattacagcaactgtgattggaagtatgcttacaggaatggcagttccctgttttgcaggtgagaaaaaagacgatggaagcagtattacagttcttgtagaaagtggttcacctgcagaagcacttgccaatgatacagcagctgattttgagaaagaaacaggctgtaaggttgttgttgatgctgttgcctatactggtatgtatgataagctttctaccgaaattaaagcaggacaggctgctcatgatgtttcatgcatggattttgtatggctggcagcttttgctgatgcaatcgaaccaattacagatgcagataccagtgatttccttccaacgctggaagaaagcggaacagtagatggtaatcttctgggatatccgatgtgggtaaacgctaagatccttatttacagaaaagatctgattccggaagataaagtgccaaagacctgggatgaatataaagcactggcaaaagaaatgaaaacagacgatatgtacggaacaacagtttttggaagtggttctgacgcagtttgttccttccttgattttgcctgccaggccggtgcagatggattagtatatgacaaggatggaaatgtaaatattacagatcagccatatgtggatgcgcttgattttatggttgaaatggcaaatgaagattgtacgccatcagattctctggctactgcttctacagagtctcaggaacttttcaataatggtaaagttgcaatgcagttgaactggagccatcagtatcctgcagctgttgaggcacttggagcagataaggtgggatgtgcaccaatgattgccggcagtgcaggagcaggagcaaccacaggtccatggtatgaatgtgtaatgaaaaattctgagaataaagacatggcactgaaatatgtagaatatatgtacgatcataatgcagattatatgaacggaacccttaaaattgccggcagaacttctgtttatgaggaagctggaaaagaggctggtaatgagcatacaacagcagttcttgatacattgaatgaaaaacagtctcagccaagacctatgatttcaacctggtcacaggtagagcaggttcttacaggtgttgtagaatcctgtcttggtggagcagatgtgaaagaaacccttgaatctgcaaaagaagagattgaggcaattgggaagtaaagtgacaaagtaataaagaaaaagcagattgcagacatctaccaaataataaaaaatgtaattaaatcaagggtgattttacctggacatcgaacacactaactatgaatttactaatctatgatgtatgatgcagggagtaaatcgcccttgatttttataagaaagcgggaaatattatgaaattgatatcaaaaaaaacactattgctgttttttcttcctggcgcgattttcatgggtgcctttttgatttatcctatttttaaaatggtatttgacagtttctttaaggttggaattacaggagccagaacttttattggatttgataattatattaaagcatttacagctggcggttttttgaagcagctgaaaaatacattgatttatattttgattgcggtatctgtggaaacagttttaggatttatttttgcattattatttgaacttgattataagggcagtaaaatagtacgttcattaatgatgacaccacttatgatcgcaccgctggttgcaggtcttatctggaaattgatgatgagttcaaactttggtattgtcaatgagtttctgaccagaataggaatcttgtccagtccaagtgatattttgtggcttgcagattccagatggtcattgatcgcctgctgtattgcagatatatggctgactacaccgtttatgatgctgatgattctggctggccttcagggattggataccagcgtgtcagaagcagcaagaatggatggagcaagtaagctgcaggaaattttttacataaaaataccgggaattaaaccggttctgttgacagcattgtcagtgagaattatagatgcggcaaagacttttgacattatctgggcaatgacagaaggtggacctaacagttcatcagagacaattagtattattatttataagacacttgtaaagtataataatacaggatatgccagtgcaatggctgttatctttatcatagttcttgtagtgtttacattagtatttatgcagagtttatggaatccaaagaaaaagtaaaagctgtcaaagaaaaacagtaataaaaaggattcaataaggagaccaaaatgaagaaaggtaatagtatcaaactaaaaatagcagttattatttctataattattacgatattctggctgcttccatatatttatgtaatttgttgttcgtttaaacctggatcagaggtaattgctgttccgccatcttttcttccaaaaagcttttcggttgaaaatttcactcaattatttgtaagaatgaacgcgggtgggtatctgctgaacagtttgattacagcagtttgcagtacaattattgcagttatcctgggttcactggctgcatatgctattcagagatctggagcgaagctgtcagtagggctggtggtattgattttatgtctgaaaatgattcctacatccagtattgcagtacctatttatgagattatttgtaatatgggattgtatgataccagaattgcattgattattgtttatgcggcagtaaacatgccttttgtaatgtggacaatgcttagtttttatgagggagtaccgtctactttggatgaggctgcatatgtagatggcgcttccagccttcagacattcagaaaggttattttaccgatttgtaagccgggacttgcaactgcctttatatttacattgttcctggcatggaatgattttcttatttctctgttgctgaccagtatgaatgctaaaacatttacagtaggtcttgccggtttcctgtcagcgtataatcttgaccttggaccgatgtgtgcaggagcatttttatttagcttcccggtaatgattttatcaatgtttgcacagagatacattgttcagggaatgacagcaggagctgtaaaaggataataagaatggagaaagccagtgaataaaatattaatgagacaaagaatagaaaacgcgcaaaaagaaattgacagtaaaaagatgattgttcaaaatggaaaaatgcgtcagcattatcattttatgccccagagcgggtggatgaatgatcctaacggactgatcttttttaacggacagtatcatgtgttttatcagactaatccatataatggattttgggattgtatgcattggggacatgcagtcagcaaagatttagttcattgggaatatttgcctctggcattggcacccagtgaagagtatgatgattatcaaaaaggtggatgtttttccggcagtgcaatcgaacacgaaggtaagttatatgtattttatacggcaactgcaaatcatggaaacggaagtgagcaaagccagtgtcttgctataagtgaagatggaataaattttgaaaagtatgacggaaatcctctctttgatgcaccggaaggtattcagccggattcattccgcgatccaaaggtatggaagcatgaaaataaatattatatggttgtaggggccagtcgtaataacagaggattagcattgatatatgaatctgcagatctttatcattggaattttttaaacgtgctggcagaaagccgtggagaatggggattcatgtgggaatgtccggatttttatcagcttggcgataaatatgttctcactttttctccaatgggctcaggagatcatacatcagtatacctgacaggagattttgattacaaaacaggaaaatttgactggcatatcagtggtgaaatggattggggatttgatttttatgcgccacagtccatggttgctcctgatggaagacgtctgattgttgcctgggcgaatgaatgggaatggatgcctctctttaaggactggggacctacttatcaggagggctggtgcggattttttaatgtgattcgtgaagttcggatgtgcaaggatggaacgctggcgtttgttcctgtagaggaaatggaaaaaatccgtgaaaacaaatttacgcaacgggaaatacagattacagaaacacctcagcagttaaaagcaggagatggaatcagctttgagatgaaatttacattggatcttgaagaaactgatgcagacagggtagaactgaagctcagatgcggaaaagaaaaagaatcccgttgtatttttgatctgaaaaatggtgaattgctggtagacagaagctgtgcagatggatggagtgtaggaacatccagaagtgtacttaaggtcagcgaaaaaagtctggatgtacatatcttttcagatcagagttctctggagatatttacagatcaatacagaaataatcattccaataatatttttgcaggaaatgatcaggatgcaataagtatatctgcgtttggtggaagagcggtaatcagagactatgaagcatatggattgcaggagtgttttaactgaatcaagtagcggagcggattgcgaatatccgcttgacatgaactgaaagcaggaggagtattgaaatgaaacgtaataattattatgatgtcactgactggcaggtaggtaacccatatacggatatcggagaagtgatcaacagtatcattgcagacatcaagaacagacagaaggatacaaatgtaaatgatggaggaaaaccgggagcagtaatttatattccgtctggagattatcatttaaaaacgcaggtgaaaattgacatcagttacttgaaaatccaaggatcaggacatggatttgtgtcttcaagtatccgatataatgtgccaaaagaacagtggaaggatcttcatgacatctggccgggcggtagcaggattctggtagatttggaaccattaaagggggatgaaagatccggtgctgcttttctggtggaacgagagggagatccgagaatcagctccgtggagtttgaaaatttctgtattgatggactccattttgtagatgatggaaatggagatccagagaatacatatttaaatggaaaaacaggaatttatgtagccagtgcacaggattctttcagaattacaggcatgggtattatttatctggagcatggagtgactctttacaattctgatgcattatctgttcatgataattttatagcagaatgtggaaattgtgtagaacttcgtggagccggacaggcatctaaaataacagataatcttatgggggctggttatagaggttatacaatttttgccgaaaattttggaggacttctgattacttccaataacatttttccaagaggaaaaagtatagtacatcttaagggtgttcttagatcatcagtaactgcaaacagatttcattctttttatccgggaatgctgataatggaaaattgtagagaaaatctcatatcttccaatcattttctcagagaccatgaaccatggcctccgatgctggaatatgataatggattagaggatgattttggcctgattcatattcagggaagtagcaattcactgattgctaatcacatttcggagacgattgaacagcaatatctgaaaccggcaggcgtaaaaccgataatcattcgtttggtttccggaagagaaaattacattgcaaacaatcatattgtggcaactacaaaaactgataaaaaagaaagtgaagaaaatcaatcctgctttgatgcgcaggttggagcattgttaagtatggatgaactggttaaacttccgattgaagcagtacatgttgatgaggcatcattggataatataatactggatacatgcagagaaaatgaagcagttatggattttgcagaaaatgtgtttcggggaattccttgtttttcgcagtctgcggaactgtcttgattgcattattataaattgtaaaaaatttcatgattttaaaagaaaaaagcacagtaatcaaagagaactgggaaaatttataatactctcgtatagttataacgaggctatgcacatcacacatgcatagccttgatccattttcagccaaagttccgttcgtattttttacatactgacgcattgtcatgcctgtatattttttaaatactttttcaaggtggatttgggatgaaaagccaagataagttgcaatttcaatataggaatatggagaataggaaaggagatttctggcaagctttaccttttcttttaaaataaaatctgtcagtgtaatgttttatattttttaaacagttcagacagatagttcgcattcagatgcagatattctgcaatatccctaatacagattttttcatgtaaatgtttaaaaatataatccttacattgctctatccagatgttttttcttaatgtattctcagaatcctgttttgctgtcggatctcatctactgctttcacatattccatctgaaattgacgggctgtatttaatatgataacaggatctgtctcagggtaaacacagaggcgaataatagtagcaggataacagataaattgcatcatttctatagtgattctctcaaatgtattatttatgaggactactgtaaataaacataagttaacagtaaaaaggatgtcggatttgctcccggcatcctttttatatgggatcatacaggataaaatagtataaaaaaatgtcaaaatattttattgaaactcctcgtgattttgctatgatatagtaagattatgtcggcagaaggtcagtactatagatatatagtgaatcggagacaaaattcagaaaggggatttttacatatgtacacaggaaactatgaatgtctggaattatttgtaaaaccagaagccgggaaaaaaggcagtgtgagcctgaagaaggtaaaagaaaacaaaacagaaataaaagaactgcagcatatctatgggaactggatcaagttccgagccgggagcttatggaagcatgactttgccaagagaactccatgtgaagaatgaaaatgagggataaatagaaatgaccacatctatgataaagggcaatccgctgaaactgatgttacagttcgcgtttcctttactgttaggaaacctgctgcaacagacctataatattattgatgctgcgatcgtaggccagattcttggcgcaaaagcactggcaagtgtaggagccagcagcagtattcagtttctggtactgggattctgcatgggaagctgtacaggctttggtgttcctgtagctaaatatttcggtgcagagaaaatagaaaaaatgcgggattatatctttaatggagctgtattatgtgcaggaatcgcagtgatcctgacagcattatgcagtgttttatgtcctcagattctgcatattttatctgtaccagaggacatttatgacaatgcatatagttatctgctaatcattttcctggggattccctttacgattttatataactatctgtccagtattttgaggtcagtgggagacagcaggacaccgtttatatttctggcgttatctgctgttctgaacatttttctggatttattctgtatcgtagtgctgaaacttggatgttccggagctgccattgcaaccatttccgcacaggcaatcagtggaatcttgtgccttatttttattatccgcaaaatgaaacttctgtggctcaagaaagaaaacaggacaataaaaggggatgcagtaaaggaacttctggcaatgggaatgcctacgggacttcagttctccatcacagctatcggaagtatggttatgcagtctgcgaacaacgggcttggcagtacatatgtatcagcttttactgcagcaatgaagatcaagcagtttaccatgtgtccatttgatgctatcgcaacctctgcttctgtattctgcagccaaaatcttggagcaggacagtctgacaggattaagaaaggattgcgttgtggtattacagtgggagtaggatatggtattgcggcaggaattttactgatttttgcagggcatacactttctatgctgtttgttggaaagagtgcggtggcagttctggatgcctctgccaaatacctcagatgtatgggatttttctactggagtcttggtattctcaatgtcgcccgtatggtaactcagggacttggatattcaggcagagccgttttctccggcgtaacagaaatgatcgccagaacagttgtctgtcttggatttgtaggaacttttggcttcacagccatctgcttcgcagaccagactgcctggatcacagcaacctgctatatttttccgacatgcctgtggtgcatccgaaagtctacaaaaatgcttgcatctataacagtccgagtaaataatgcatcataatccagcccatcaaagtgtgaacttctgcgtcatatatcttccttgtctttcgcactctgctgaactgtcttaaatgcattatttattaggactgttataataaaagtatgacaaaataagaaaacagctatgcaagagcagcagataaaaatatctgtactcttcatagctgtttttatgtatggtttatatatggtaaaactattgactatatggatatcaggttaaaagagcttctgctcagatgcttttttatccgtaaatggtcctgcgacagttttgacatctctgtgatttccaaagaaatcctgattaaagataatcgggcttccgtcaggattttcgtatttctgctccggttcgaatgccataccaagtgtttcagttgagatgataccgtcgttttcttctttgatgatatcatacaggttggtcttcagataccagccatcttctttctcttcaacagagatatctacagtgtgttctgtatctgtgactgcatctgtttctttttcccatgcacgtgctccattgaaatagagattgccggatgcccatacaggaagatgatcataatagcagttgcctgttgtctcagaacccattccgcagtaaccttcgaactgtctgttccattcatcaaaggttggatatccgttaaatttgaaagttcctgtgagcacattgcagtcatcccacatatttccattgttacccataagatcagccagatcctgtatacaaggacggatcggtttctgaacgaagatgttgttgtagaatctgtcatctccatgaaggatggtcataaatcctgcaacctgagttccgtgtttggtgtgatatggagtatatctcggagatggaatatcaggtgcaccgttgtctgtaccgataccaacagaaacgaagccgccgcagatcaggttatgtacaagggcaacaccctgggttgcaattttcagtgcacggtcagacagcaggatattgtggtcgattaatgtcggaccatgggaaacctcaacgaagatatcttctcctacgcttgtgacagcgtcatcccctgcttcgaaatcatttggaagagcattgtcatggaagagatttcctgtaacgcgggttccctgtgcctgccagtcaagccacagaccacgggtgcagttgtggatatggttgcggcggaaaataacatcaatagcagcatgcattttgataccgccgatctctgctcctgccagattctgcttgttgttaatgtgatgaatatggttgtcttcaataacagagaatacgcctccaagatgtcctacaatacctgtctgaccgcagtcatggatctcacatctgcgtacaatatgggaaccgatgtgttctttatcccatccttcataggaagcctggcagatgcagtcgcgttctgtctgagttccgtctttgtatttccactttaaccatttgttatcattttcaggctgcagatatttaccaagagaaataccgctgcatttggattcatagatttcacagtcttcgatgatccatcctttggaccagtgaggaccgaccattccctcctgataagcggtagggggagcccactgagtagcagcctgactgatgcggaaaccggagagagtgatatatccgattccttcactttctggatagaagcagtttcttcttacactgatctcaacattttctttattgggatctttttcatggaagtttgcataaataattgtctgattattggcttcatcctgttctgcgtaccatgtatatacagagaaatcaggatcccatgagatagtacttttttgtggatttttaactttatccagagtggttacttcatacatggatttttcattcagatatacatctcctgtatgagcaataaatgtagcgataaaccaatctccggatactagggtagtaaatgggttataatcaccgaagattccgttcggaatgactgctttccatacagtgccttctacattttcccagtctttgacagcttcacttcctgtaatgtgcgcctgtccttttattgcagaacggtaggtgatacgcttgtctgccgttccagcgtgaatcggattaacagcttcacggtataatcccggtgcaacgatgacttcatctcccggaagtgcctttgcagcggcctcctgaatagttttgaatggattttcttttgttccgtttccggtctggatcacggatgcatcaacgtaaataatcattataaaaacctcccggccttctggcctgaatccttctgtttgcgggcgaaatgcccataagatatgtaatctagtgtagcatgtagatatgcagcgaaacaatggaatcctgtgtcattttgtatgaattttgtgatgattcattactgttcactgaaaacgtcggattcgaaaataagagaacgaaagaatttctggcaaaatcctgtaaatagaataaatcttgatacttaaaacttaaaatagtgagtaaataccgggctttatttaccagtaacttttacctgcatattacatagattttgatgtaaatactctgcagatgatatattataaaaaatacaaatattttcagaaagtgcaggttatcatgaataaaaagaaatcaaagaataaaaaacaggataagcagagtgagaagccggttccgaggaaaaaggaagaggagcagacagaaggaactggtagaaattcagctcagaacccttgctatggattactggtctgtactggaatatcatatatatactgcctggattttaaaaataaaaatccaggcagttattttaataccagcgtgtcattggcagatcattattgatccctttagtcatcagaatctggtgcagatcaataattccgttatggaaggttgcagcacatgctgacaggtaaagttcccacatacgcaggaaggatttatcaaacatggtcttttccttttctatattctcacggaaattcttttcccagtggagcagagttttattgtaatgcagacgcagattttcaatgtccagagtgtggaaattgtcctctgccatatgattcaggatttctctcagactgggaacagttccgcctggaaagatatatttcttgatccatggatcacccggatgttctttcagtgcactgataaaatgaagcaggaataatccgcccggtttcagaactttctctacacagtcaaggaagagctgataattgtcacggccaacatgttctagcattcccacactgactacccggtcaaactgatagtcatgctttggcagatcacggtaatccatcagttccactgtaagataatcttccaggccctgatctttgatgcgcttctggaattctgtatattgttcgtggcttaaagtgattcctgtaccatgtactttgtattttttagcagcctcaatcagcagaaaaccccatccgcagccgatatcaagaagactcataccttcttccagatgcaattttttcagaatataatctactttattgacctgtgcctgatataaagagtcatcgtcatgaatgaagtagccacaggaataactcatggtttcgtccagccataatttataaaaatcatttccgatatcatagtggctggtgacttccttttcctgattttttttggatgtagaactgaacatgatctttttcagagcagattcattggtagaaaatttgctcatctgtcccagaaaatgatccagtgcctcgtaaagatttccttcaatatccagatctccccgcatataagcctcgcctaatgccagggaagtgctttttagcagctcggccagaggaattgtttccttaaaatttactgtaaatgtgggttctccctctccgattggatattcggaattcttgaactttaccagaaatggatagtccgtaaagcgttcaaggaattgcaccattgctttttcttcagccttttctcctaatgtctcaaacataatatacctcctttaacacaaaactatgatacacctttgggggtgcttatcgtcaaggggagaattaaacaaagatatctgggaaattggtcagacttgtagcagaataatggaaatagaagaagaaacaaaaagttcacaaaaaacatcttgaccatcaaagaaacacaagttataatcctgtctttgacagttactaaacaaaaaaattgctgtacctcttgattttactgaggttcggcgattttttgtgttgttttggaatatagtattttattcccggccttttcatcgttcttagtttatccaagatcgtttcgtagctgatggcattttccaggtctctttcaaggtaacgatatatcactaatgcaaggaaacagataaggaaatgggcttttatgcgtatatcgtcttgaagaaaaaatggttttgtttcaaaatcagttttcattatacggaaacatttctcgatttcccatatgtcgatattttagaaatgccgataaattttctataagattccatgcctgacccaatgtcaggcacaagtaatgaactatcggcatttatttcaatccacaaagccgcttgatagtatcttcgtcattggcatacttgaacatcacatcatccttaaagatggaactgtcactatcgctaagtttataccgtgtcttcatcatcaacatcgcttatctcatagattgtctcatactcatcaaatgaaatactataataatgactgattacgtctctatagtgagaaatgccgatatatttacaaagtcttataaatccaatatttcagaaagtcaaaaatcggcatttctaaaatatcggcataatattccaacgaccttcgctgacttttaagatatcttttacgtcatcgtctaagaggtctgtagttactgcatacatcccatcatataaggcttcctgttcgatcttttctgtgtccagataattgtggatctttgcagtttctccatcttcagttgctgcgactttccctatgaatcgagcaggatcattcggattcctacgttccttctttatcgtaccggtgctgagcattttttcagcacgttctatctgggcatctcaaacggatttctgatatcttgcatactgtggttttaaagaagtttgtttatttgcatttcccttattgttaatatagcttttggcaatataaaaggattccgaattttttgattttgatgtagttactttcatggaaaatccctctacacacttctgaaaataatgctatataatactataaaataaagcaaaaaatttgacataaaaaagcaggtaccataaggactgcaagcattttttcttatattcaactgtcaaactcccgtgttcactgacaatgtcggattctgatttttttctgacagttttttgcgattttctaagaaatatgatataatataacattatataatgtttgcatatggaaggagtcatcaatgagtttggataaaaaatcacagttaccattatatgctcagttaatgaaagagataaaagatcagattcgaaagggaacatataaggagggagatcagattcccacagaaggagaattatccgctgcctatcaggtcagcaggattacagtgcgcagaacaattgaagagttatgctctcagggatttcttgtaaaaagacagggaaaaggaacttttgtggaaatacccaaaatatatcgtaaaatagaaaatgataacaacatgagtttttctgaagcgtgtcgttcaaatggaagaaagccgtcttcacatatcatttcctgtcatattatggaaatgcaggaatggcagcaggatttttttaaacctgaacatactaagatatatcacatagaacgaattttgtcagccgataacttgccgattatttatgaacatatttatattccaaccgattttcttccagattttcaggtggaaaagctggaaaatggatctcttacacgtcttctcaataaagaatatcatatgaaagaatctgaaaaagcgagaagtacagtagaagtcagtacagtttctcaaccagtggcaggataccttagaatgaatgaaggagaacctgttatgattctggcaagctatattaataatgaaaaagaagaacctttatatatcagttatgaaattattgctggttcacgttacaaaatttccatatagacaacgaaaatgtaatattaatagatggtgaagaaccgtttaaacacgaaaggttatattgaataaaaagaaggatttcaaatcttgttttcagcacagaaatatactctgaaaatgagaaacggaaatcctttttttgtgtgttatagacaaaaaaataaagaataaaatatcaagaattcacaaagttatgatttgcccaaaagatcatattgtattatgacgttatatgatgatataatacaaaccaagaaaggaggacgtgataaatgaaaaaaagattttcaaaagtgattattgcaaaacatctttttgacggtataaatgagaaagattacgaaggatatctgtgtttaagtggaaatcatattgtcgaaaaaaaagcaggaaaacctgaaaaagatattttgaatcaggcacaggaagttcttaatttcagggatgaactggttatgccgggaattacagatactcatacattttttaccggatatgcaatttatcatgtaggagcagatttttcgaaagtgacagataatgaagagggatgctgtattctgagaaaatatgagcagaagagacatccggagggagcattactggggcatggatggaatccggagatgtgggacaggcagaacggagaagaaatgctggaagagaaatttccaaataaagcggtgatcattttttcggcagatcgttcctgttgtattatgaatcagaaagccagaaatatttatcagttttcggcagaaacatgttatccggaaagctattaccgcatcatgagagaatatctgaatgaccgggaatttattaaaaaggaattttcagattatatgaaaatgatgaattccagaggggtaactactgtaaaggaaatgggatttgatgacttctatggatttacagattatcttaaagaactggaagattctgaagatcttaatctgagaaccttctttatgtcacagcctgtaggtgaaggaatgaatcttgtttatgcccgcagaatgagagagcagtttacaggaaataagattcgtttcagtggttttaaccggatgactgatggtacgattgcttcttataagggtgatttaaaagagccatatgaaaatcaggatttctgctgtaaagatccggttccatatgaagaaattgaaaaagacgttctggcagcagatgcagaagatttcagatggtctttacatgcacagggagatggtgcagtaggaaaaattacagaaatttatcagaaatgcaagaaggttcagggaaagctgaaaaacagacatgcaattacagatatggagtttacagatccaaaggatttggaaatccttggtcggattggggtaacagcagaattatattttcagattatgtcactggatccggcagatgtgctgattaataatattaaacagacgataggtacagagcgtggaaaatattactggaaccgccgtaaaatgcaagacagtggaatgaatttaagtggtgccacagatttaccgttactgcttaccagtataccggaatctatctattattcctgtggaggatacatggatggacgtgctgaagcatttcaatcagaaaatactcttactgtaccggaacttctgaaagcatggacaatcggtggacagaaaaatctgggtatggaagaagtgcttggaacgttagaagaagggaaactggcagatattactgtgtttgacagaaatttacttgaaattaatccggtagatgccagggatgcaagggttgtaatgacaatcatggacggaagaaccgtttttacagaaaatagtcagacagaaaaaaactgatctgacagaaaacaataagaaaaggggaaggtaaaatggaagaaaagaaaaaattcaaacttcatatgccacatgtgctcacattgatttttttcctgataattgtagtggcaatacttacatggattcttccaagtggtgagtttgaacgaaaggtaatggaaacttctgcaggagaaagaagtgtagcagtagcaggaacttatcattcggtagataaagttcttgaagatggaacaaatttaagacagggaattgctcaggtacttatggcacctggaaaaggaattcaacagatggtagaggttcttgcatttgtctttattatcggcggtgtatttcagattatggccaagactaatgcactgaatatgggaattcagaagattgtgaaaaaacttggagcaaaagaaattctgatcataccgattctaatggttctttttggattgggtggaagtacctttggaatgtcagatgagttgattccattttatttattgatcatgccaattatgtttgcaatgggatatgattccatgactacttttatgacagtctgcttatctgcaacagttggttatgctgcatctacagtaaatccattttgtgtattgattgcacagggcattgccgggattcagggaaatccacagctggtatttagaatgctccagtttgtgattatgatggctttggttattgcttttgtaacctggagagcatttaagattaagaaaaatcctgaaaagtctattacgtatcaggatgatttgctcaagaaaaaagaaatgaatacggatattgattttaatcaggaaatgacaattcgtcagaagctggtgctcctcacttttgtaatcggaatggttatagtggtagtaggacttgtaaaaaatggctggtatatgaatgaattatccatgtgttttctgggaatgggaatcctgatgggaatctttggtggtatgaatgaaacagaaatagcagaagagtttatcaatggcgtaaaggatattgcatttgcagctatggtaattggtttttgcagtggaatcatggtaattgcgcaggatggaatgattattgatactattttaaatgcattaagtggactggtagaaaaatccaataatgttgttttctcggcagtgatgtatgtggttcagtctttactgacattgttagtaccgtcctcctcaggactggcagcattatctatgccaatcatggcacctttatgtgaccttcatggtgtaaatccggaagcggcagttacagctttacagtatggaaatcagttgacaaaccttatgagtccagtagcaggaacaacagtagcggggcttgcaatctgcaagatttcatttggacagtggtggaaaactatctggaaaatgtttttgatcatggctgttatagcaattgtattctgtacaatttcagcaggattatagaaaactataaaataaaaaatataaataaaaggagattattaaaatgaacagaccagaagaattaatcaaaaaaatctatgaagagcagggacagattaaagatgtattttttacagcatgtggaggttctttagtggatctttatccgggattctattttatcaatgcagaatcagaaactatgcactctcattggcttacagcaaaagagttgattgtatccccatccaaatttctgaaaaagggtgcacttgtaattctttgctctcatggtggtaatacaaatgaaactgtaaatgcagcgaaacttgccaaagaacgtggtgcagcagtgattactatgacacataatccaaattctatctgtgcacaggaagatatgaatccagtcgtatatagctgggaagatgatacaaatgaaaaagaaagaccgcagggaattgtaatgcgtgttcttaatgaactgatgaagttacaggagccatcttatacaaaatatgaagctgtactggatggacttgaaaaagctgacggtattgtccgtgcagcagtaaagaaagtacagaaccgtacatgggtatttgctgagaaatattttgaagagccgttcctttatattatgggctctggtgcttcttattcacaggcatatggtttctctatctgttctcttcaggaaatgcagtggatggattgctgctatctgcattccggtgaatatttccatgggccattcgaatgcacagatgaagaccatctctacattcttcttatgggaacaggtgcagccagagttatggatgaacgagcacttactttcctgaaaaaatacggaaagaaatatgaagtaattgatgctaaggaacttggaattgatgcaattgacgaaagcgtaaatgaatacttctgcccaatggtattctatgcaatgtcagtagcatatcgtacaggtttacaggacaagagaagacatcctcttgatatgagaagatacatgggtgttgtagaatattaatattctttcgtaacaagtctggcagatatgaatctgccagatgaaaaaggagaagaaaaatggtaaagtataatacaaaagtactgggatttggtgataatgtagttgatctgtatgaacattctcatatgatgtatccaggcgggaactgtgtaaatctgtgtgcatattccaaaatgtttggtgtagagagagctgcatatatgggatattttggaagtgatgacattgcagaatttgtaatttcagtattaaatgaacttggaattgaaactgtaaagtgcaaacagttggtaggagaaaacggatggtctaaatgtacacttcgtgatggagaccgtatatttggggattataatgaaggtggagtaagaggaaagactccgtatattcttgaccgttttgaccttgaatatatgaaagaatttgattttgtgcatacgggaaattattgctatacagaatcacagctgaaagttatgaaagaggctggtataaaaatttccttcgatttttctgatgactcttccaaagaatattatgaaaaatatgcaccatacattacatatgcattttgttcttttgacggagatgatgaagcagcaaaagaacatctgaaatttattcattccctgggaccggagttggtatctcttaccagaggttctaaaggctgcattatgtatgatggtgaacagttttatacacagccggcaacacttattgacaatgtggtagatacaatgggtgccggagattcttttctgacctcttttatggattgttatattgatcagctgaaaagaggaactgacagacaggaagcaatccgtacttctttaaaagaagcttctaaatttgcagcacatgtatgtacactcaatggtgcttttggatacggaaaaccatacgaggattagaaatataatatatagagtgaatgacaaagaggagaaaatatatgctgtaccatggaaatgcaatggattacatatatgagactcctgatatcctgcaatacatattggaaaataagaaggaaattcttgaggacagcaacagagtgctgaaagataagaaaatatcagaaatttacctgacaggttcaggatcttcttataatgcagcagtagctgtagccgattttgcaaagaaattactgggtatacgggttacacctgtatacccagtaatgcttatagaggattatgaacttatttcaaaaagcgcagtggtaacaggaatttcacaacagggaaccagtgcagcagtcataaaggcactggatgatgttagagagcgcggcattgtcacaatttcaatgaccggtgaatatgatacggaaattaccagacatgcagatgctaacatatatattgaatgtggttatgaagatgctggtgcaacaaccaaaggttttacggcaacagtattgactttgatgatatggattattgatactgccgaaagcattggaaggattacagaaaaagaagctgaaaactataaaaagcgaatagatgttgtaataaagaatatgaaaaatattctgcagataagcaaactctggtgctcagaaatatcagagaaactaaaagataatgaagatatgatacttatttccggtaataaaatgaggagtttgctactggagggaatattaaaattttctgagacctgcagatttccggtgaggggatatgaggcagaagaatttatgcatggtatgtataatgctgtcacttcaaaaactaactttttatatatttttccacctaatggttatgaaagaaatcgaatggaaaaattgttcgattattatacaaagcagggttactgtttatttgggattaattccaaacaggtagatgaaaatataaaatatatactgaactgtaaatttacagacgatcctgagttttcaattctggaatatattctgcctgtacaaatgttgtttgttatgacatcacgggcaagaaagatagatttgaatattccgtcagatcctgattttcatagatatatgggtagtaaactggaaaaataggaaagtgaaattatatgggtattattgagctgtgaacaggtaacagaagaaagcatggaggataaaatggagaaattaatcaacagagaacaattggcaggtatgaatattcattatttattttattcattggaatattttcttgatgcacaaaaagaagccggatttaaaacaattgagttatggcctggaacaccgcatttctttttaagctatatagaatattctgactgtaaacatgtcagaaaacttcttgatgaaagagatttgactgtgaaggtgattacaccggaaaattgtacataccaatatcagttcgctgcacaggaaaaagagcagtttgaaaaaagtatggcatattttaagaaagctctggatgccggtgaagaattgggtgtagaaacaatggcaatcaattcaggatggggatattggaatgaagacagggaggaagcctggaaacgttcaagggaaatgctgtctgttctggcagaatatgccaaaacaaaaaatatccgactggcaatggaatctcttcgtccgcaggaatccaaccttgctactacggtatatgatgtaaaaagaatgctggatgaagtaaatcatccaaatctgaaagcgatgattgataccacagcaatgggagttgccggtgaaacaattgatcaatggtttgatatacttggagatgatattatccacatgcattttattgatggaaatccttatggtcatctgatttggggggatggaacgcataatcttgaggagtttctgaaggcaatcaatcgtcatggatataagggatatctgggacaggaaattacagaatttgactattttaaagatccggctagggcagataaacagaatatgaaagcatatgaaacatttatacgctaaaactcacattataggagaccagctatgagtgataaaatgagaataaaaattttttcatgcatcatgcttactctgtttttcttatgtgcatgtagaacgcagagtgtctatgctaaggaaaagataactgtcggaacgaatgcagaatatgcaccgtttgaatatctggacagtgatggaaatctcacgggttttgattatgaacttctggaagcaattgcccaagaagaaaatctggaattggaatggaaagatatgccctttgattctttggttggttctatggaaaccggaaatattcaaattattgcggcagcgataggaccaacaaaagaaagggaaaaaagtgtagatttttcggatgtttattatacgggatcccagagtattgtaagcagtcagaaaacacctttgtatgattttgctggattatccgggaaaagagtagcagttttggaaggatcccagagtgatttcattgtatccggagagaatacagactatggtgttgttgaaaatgcaacagttgtccgctttaaaaacgctgcaagtgcagtaatggaactgaaaaacggaggtgtaaatgctgtcttaattgatactattatggcagagatttactgcagacagaatgatgatattgtttatcagaaagtggatggaacggaagaggatacagtgtattgtattgaaaaaggaaatacagaacttttaaatacagtaaataagggactgaaaaagttaaaagataatggagaatatgaccagatttatgaaaaatttttctcaggagaaaatgatacaacgcaagttcagatagcagataacacaggaataattggaactttcaaatttatttttctgcaggataaccgttggaaatattacctgaatggactacaggttacgctcctggtttcaatcatgtcagtacttttgggaactgtgattggattaatggcagcaatgataaaattgaatgccgatcgtaagaaaaaagaaactgtattgtcgaggattatccatatatatgtagatgtgattcgtggaaccccttcggtattacaattgatgatcgtgtattttgctgtctttcatagccggttgggatatgtggcagcagttgtgagcttcgggattaacagtggtgcctacgtgtctgaggtgatacgtgccggaattatggcagttgataaaggacagcaggaagccggaagatctctgggacttggatataaagatacaatgagatttattattattccacaggctttaaaaaatattctgcctgcaatgggaaatgaatttatacagttgattaaggaaacttccattttgggatatgtaggtattatggatcttaccaaagcttctagttatgtttcatcaagaacctatcagatgtttataccattgataactgctggaattatgtattatctgattgtgaaaatactctctatatttctcgaaaagatggaaaggagaatgagacaaagtgattagtgtacataatctgaaaaaatcttttggaaatgtgcaggttctcaagggtattaatatagaaatacgaaaaggtgaatgtgtctgtattattggcccttcaggatctggaaaatctacttttttgagatgcctgaatcttctggaggtaccagatgaaggagaaattattatagaaggggagcgcattctggaaaaaaggaaagatattgataaatatcgagaaaatgtaggaatggtatttcagcatttcaatttatttccaaacatgacagtgctgaaaaatataactcttgcacctgtaagattaggaaaatggaaaaaagaagaagcggatgaaaaagcaataggactgttaaaaagaattgggttggagaagaaagcactgtcttatccatcaaagctttccggaggtcaaaaacaaagggttgcgattataagagcactggctatgaatcctgaaattcttttatttgatgaaccaacttcagcattagatcctgaaatggtaggagaagtacttgatgtaatgaagaaattggcaggagagggaattacaatgcttatagttacccatgaaatgggatttgccagagaagtgagtgacagggtattgttttttgatcagggagctatattagaagacggttctccagaagaagtatttgaaaagccacaacataagagaacgaaagaatttcttgcgaaagttttataaaattcgagttacaaaaagaagatagtgttatggttggtgtaatgtaaaaaacaaaaaattcacaaaaaacatcttgaccatcaaagaaacacaagttataatcccctatataaaaattttcgtacaaagagcagacaatggggtctgagaaagaatcccattgcctgctcttttttgtgtactgcgaggatttttattactgttcacacaccactatcccgcgaggtgttttggcatgaatacgccaaaatcccgagacatacaagccaaaattccattgccgcaggcaatctggaatgaattttggctacgttactgagaacggagtgaacagtaacagatttttgcatattataatccgcacaattcgagaggaggaatatcatgaggctgaatcccaaagaacaggaaaaattaatgcttcatatggcaggaaatcttgcaaaagagagaaaggaaagaggtctgaaactgaattacgtggaggcacttgcgtatatcagttctgaactcctggagcttgcaagagatggtaaaacagtagtagagctgatgcagcttggaaccaaaatccttacaaaggatgacgtaatggacggtgttgctgatatgatcggtgaagttcaggtagaggcaacattcccggatggaaccaagcttgtgacagtacataatccaattcagtaaggaggagaatgagcatgaagatcggtgaaattatggccgcagatcgtgagatcacacttaatgaaggcaagaaaacagtgacagtaacagtggcaaacaaaggcgacagaccggttcaggtcggttctcattttcacttctttgaagtaaataaatgcctttcttttgacagggaaaaagcctatggatatcatctggacattccttcaggaacatctgtaagatttgagccgggtgaagaaaaagaggttcagcttacagaaatgggcggcagacagagagtattcggactgaatgatctcacccgcgcccaggcaactgacgatacaaaagtagcatccatggaaactgcgaaattaaaaggatttctgtaaggagggacaacaatgagtacaaaaatttccggaagcaaatatgcggcaatgtatggcccgactacaggagataaggtacgtctggcagatacaagccttgtgatcgaggtagaaaaagattatacaacctatggagacgaagtaaagttcggcggcggcaagactatccgtgacggtatgggacagtctgttaaaacctgtagcaaagacggtgacctggatcttgtaatcacaaatgctctgatcgtggactccacaggaatcatcaaagcagatatcggtatcaaagacggcaaaatcgcaggaatcggtaaagccggaaaccctgacattatggacggtgtgacacctggaatgacagtcggcgcatctacagaagcacttgcaggagagggaatgatcgtaactgcaggtggaattgatacccatatccatttcatcagtccgcagcagattgactgtgcattatacagcggtgtaactactatgatcggcggtggtacaggccctgcagacggtacaaacgcaactacctgtacacctggaccatggaacttaaaaatgatgttaaaggcagccgaggaatacccgatgaacttaggcttccttggaaaaggtaactgctcagacgaagctcctctcattgagcaggtcaaggccggagctatgggactgaagattcatgaggactggggtgcaacacctgcagttatcaatcactgtctgaatgtggcagatgaatatgatgtacaggttgctatccatacagatacattaaatgaaggcggatgcgtagaagatacacttgcagccatcggcggcagaaccatccacacttatcatacagagggtgcgggcggcggacatgcaccggatatcatccgcgcagcagcagctccgaacgtactgccatcctccacaaacccgaccatgccatatacagtaaacactctggatgagcatctggatatgcttatggtttgccatcatcttgacaagagaatcccggaagacgtggcatttgcagactcccgaatccgtccggaaacaatcgcagcagaggatgttcttcatgatatgggtatcttcagtatgatgagctctgactctcaggctatgggacgtgtcggtgaggttatcacacgtacctggcagacagcaagcaagatgaaagatgagagaggtgcacttccggaagatgcaggacatgacaatgacaacttccgtgtaaaacgttatatctccaaatataccattaatccggcaatcacacacggtatttcccagtatgtgggttctgtggaagaaggtaaattcgcagacctcgttctctggaatcctgtattctttggtgtaaaaccggatatcatcatcaaaggcggtatgatcattgcatctaagatgggcgatgcaaatgcatccattccgactacacagccagttctctatcagccaatgtttgcagctcatggaaaagctaagaacgaagcctgcctgacctttgtatcccaggctgccatggatgagaatgtaaaagagaaatacggtcttgagaaaactgtagtacctgtaaagggatgcagaaatatcagcaaaaaagatatggtatttaacgacagaacaccggaactgacagtagatccggagacatataaggtcactgttgacggtgaagagatcacttccaaaccggcagagaaacttccgctgacacagctttacagtctgttctaaacaactttaaaccattacattctggttatctgatcataaaaatgatattcgcaggactgttatttatggagttttgtgagaacttttataagaacttaccaaacgatataatgacagtcctgtcagtataaaattctgatttttatatgaaaataagctggatttattcatcttgttatgcgtgttgaataaaagtatttccacttacgaaatataaacagaaaaatatattgaagaagcaggagaggagagaatattatgttaggagtttgtcttttattcgtaggaatcgtactgatcaacaacggtatgtgttctttatataatgtagacggaaaatcaaccgccatcatgaacatctttacaggtggtctttctttatttattaactttgtcaatctggtgcagggcaattattatgcagcaggaacaggattactgttctgctttacctatcttttcgtagccctgagtaaattcctgaaagcaagtccgatcccatttgcatggttttctacttttgtagccatcaatgcggtgatcttcggtacaatcgagggatttacaggaagcactgcactgggaatcacaccggatctgcgttgggcagcaatctggtatctgtgggcaattctctggggaactgctttcgtagaagatatctgcggaaaaaaactgggaaaattcgttccatatcttcaggtatttgaaggaatcgtaactgcatgggttcctggagttatgatgctacttcagatttggtaagaacacaatcaataaaccttatcaattggagaacaggtggtattaataaaacataaagcagattctggaggttgaaaataatgctgtgtgaacaggttttaggaaagcttcatgattttgatattacaggaaaaacaatagaatatgtagatatcgaatggcacgaagcatttaagaaaatacataaaaaaataacagacaaaggaacagaagtgggaatccgcatggacgattccattctcgccagaggtctgtatcaggatgatgtgatctatgcagataatgagaagcttgtagtggtaaacacaccgccatgcgaagttatccgtgtttctctgactcccggacatgagaaaatgtctgcaaaggtctgctatgaaatcggaaacagacacgcaccgcttttctggggagagaatgatacgtttatcacgatctataatgagccaatgcttgttatgcttcagaaaatccatggagttcaggcagagaaagaagtgttgaagctggactttgacaagagaatttctgcaagtattcataatcatcatcattaataacaacggaggttcttcatgtcagaaaaacagttctatcttctacaggtaaatgatgcgctgttccctatcggaggatattcccactcccagggacttgagacttatattcagcgtggaattgtccataatgtagacacagccagagagtacatcactcacaaaatcaaatggaatcttgcgtatacagaacttctggcagccagacttgcatacgaagctgcagagaaaaaagacctgcaggaacttctgtacttggaagaacttctggaagcatccagaattcctatggaacagagagaagctgccagaaaaatgggttcccgttttgccaagaccattgaaaagcttggactttccatcagcgaaacagggattttcagagaatatctggatgcaagaaagggaaaagcagtaaatcattgctgtatttacggagttttctgtgcagaaatgcagattcctctggaagaggcgctgacacattatctatatgcccagacatctgcaatcgtcaccaactgcgtaaaaacaatccccctcagccagacatccgggcagcagcttctgagcggatgctatggggaatttgatgagatattaaaggatgtcatgaacagaagtgaggaggacttatgtctctctgcacctggatttgatatcagaggaatccagcatgagaagttgtattccaggctatatatgtcgtagcttgaatttggtattagtttattccaggctcaagcgtggatagaaacagaatcatgtgtataatatgaaatcttcaaaaataatatgtggaaagtcagtaaacagattataagaagctatcaacaagtaaagtagaaaagaggaaatcggttatgtcatacgtaaaaatcggagttgccggacctgtgggttccggaaaaacagcacttattgaagcactgtcaagaaagatggcaaaggattacagcattggtgtcatcacaaatgatatctacacaaaagaagacgcccagttccttgcaaagaacagcgttcttcctgtagagaggatcattggtgtagagacaggcggatgccctcacacagccatacgtgaagacgcttccatgaatctggaagcagtagatgagatgatggaacgcttccctgatattgaacttctttttatcgaaagcggcggagataacctgtctgcaacattcagtccggagctggtagatgcaaccatcttcgtcattgatgtagcagaaggagataagattccgcgtaaaggcggtcctggaatcacacgttctgatcttcttgtaattaataagatagacttggctccatatgtaggtgcaagtcttgaagtaatggaaagagattccaaaaaaatgcgtggtgacagaccattccagtttacaaatatccgcggagatgagaacgtagataaagtggtagagtggatcaagaaaaacgtactcctggaaggaatgtaaaggaaaatgcctatggataacaaattcggaaaaatatcccgcatcagcgcctgcgcagccttaaaagacggaaggactattctggaagatctgtcttttacagcaccatacaagatcatgatgcctttcgaaaaagaaaacggtgggatccagatcatgccgctctgtgcttccgcaggaattatggcaggcgattcccaggaattttcctaccatgtaaaggaaggtgcagatctggaagtcctgtcccagtcctttgagaaaatccacaaaatggacgaaggctcagccgcccgaaccattgaagtgcaggtagacaaaaacgctacattatactactatccccagccggttattccttttgcacagtcagcctttgacagcaagatgactatccatctggaagacgaaacctctcgtttattcctgctggagatcatctcctgtggtcgaaacgctcatgacgaacgttttcagtaccgcagattctcctcaaaagtcctgttgtacagaggagacaaactgatttatcgtgataataccagctacgaaccggacaaaatgcccatggaaggaatcggaatgtacgagggctacacacatatggcaaacctgtttctttctaagatctgcagcagagatggtgaaagttgcagtcaggaatccgggagtgtaaagtcagcagattcagcaatcaatctggaacttcaggaaaaaatctggcagatccttgatgaagattcggaaatagatggaggcgttacccgtctcacaaccggagatctggcgttgagaatcttcggttatcgtgctcagaaactgcagcaggtagcggaaaaaatcaagaaattatacgaaaaagaacaaatataaaaaatggcgggaaatcccgccattttttgtgctgatgtatagaattatgtcgctgaggcgacccgccgcaggcggagaatcattgagcatcccttaattgctctacaacgctgcatttcgctgcgttgtcatacatcatgcaaggaatcagccaccccagcagaagaaataccggaattgtcagcaggacaggcagaatggtgaattgatactcaaagaaccagaacatactgcccagcatttttcctgcaagaggtcccaccgccagcgacagaataaaggccactgctacggaggacattgcgtaaaacaatccctcgtagatcagcatggttttgagctgccggttcgtcattcctacagcctgaagcacagcaaattcacggcggcgggaaagaataccggtcatcatggcgttgaagaaatttaagagtcccaccagcccgatgatagcacagaggataccacctatcagaaggaacatctgccggaactgagcaaattcagagcgagccgtggccttgctttcatacatcaagggcgaaaactcaccggcagtgagcttcgatagatattgctctgcttcggcctcgtccgcttcgtccgctgtgtcgaacaggtagagcatcggaatggctgcaccaccgctgtccctctgtgcggtgtccacagacaaaactgcatcatagccaacgccgctataacgataactcatggaattcggaagttctaccaaggcgcagaccgtgtactctacatctctggctccatacagttttttctgacggtactcctccggtgtatcttcggtgcggagttctccggtgcggctgtcgatatatttcacatcatccgcataggtagccgtgatcgtgtctcccaccttggggtagtattcaggattgagcagattaccgtagtcatctaaggaaaccgcaatggcaatggcgttattgtccggctccagcataggagaaatatctccgtcgagcacttgcagcttgtcaaacagactgttatccagagcctcgattctggtatctcccatcaccatattgccccggtgctccatgcggctcatatgggtgtccaactgctcggcgctttcgtaccttgcatagtcctgccgcagagcatcctccgtcatccacagatatgcgggttttcgcacagcatatcccgtgccggaaagactggcctttgtgtttgctgcgatctctccgatctgttccggcgtgatgaattcatctgctgggttataacgaaaatagtcgggagtgctgacgataaaatcggcgcaggtcatggcggatacatacttctccatgctgaagccgcccacaaaggcacacagcgcattgaacagtgtcaccgacagtgccagagacaacaccaccagtaccgtctttttcttgtttcgtcccagattggcaaaggccatctgatggagctttgctcctcggatgctgcgccgttttttcttggtctgcatcacatccgtatatttggtagcctccaccggagagaccttggctgccatttttccgggcttggaacaggacaaaagcaccgtcaacaaggcgaacagcatagaaccaaggaagatcacaggcgaagtgctgatggtggtgatgcctgtattcaactggatggagtgcaagacaacaggcatcaaaacagcgccgatgccgtagcccagcagcagccccgccggaatgccgatcagacaaagcagaagtgcctgctggcgaatgatgcgtttgagctgccggggcgttgtgccaatggttttcagaagtccgtaaaaccggatatcccccgcaacagagatctgaaaaatgttatagatgataagataccccgtgaaaatcaccagcagcaaaaaagctgctatggcgatcatcagctctggatcgagctgcgattccagctgggatgaggtatatccccagttgacgccgatccggacgctgttgggatcagtatagctgtcccatgtgtagccaagatcggtatccacctgctccatctgcccttgaatgtttgtgccggaggtcagcatgacattcaaatcggtgcggaaaggctgtaaacctgttttcactgcctgcgcttcgatgtcatctgcgtaatcacggctgatgttgatgtaatgaacaggcattagttcatcatagtcccaatagcccaccagcgtaaaggtatctgttacagtaaaggcggtttgatccttgtccgtaatggaataggaaaccgtgacctcggcgcccagctccggcgttacgccaagcagctgcaacgctgccgtatccatggctacctctttgccgctttcgggcatccgtccggtagtaggggtggcatagctccatttagtgcagttggcatccatgtagctgatctctgccggtattttggcaaagaccccctccgcagtgataccgattaccttccgtgcccccgtagcctttacctttgggtgggcagcgatgcgttccgcctgctcgggggaaacatccttaaaggtgccatgcgcatagccgcctacctgccgaaactggtaggtttcatagctggcgttcaacgacaagacaatggtgaacatggaggtaaatagcagcgtggtcagcgcaatggcaaaaatagcgatcagattgcggcgacggttcgcataaagagattttaagctgagctttcgaatacattttctgtttttgacattcatcgtagccacctcccgttagttctgggagacgatccgaccatcttcgatacggataatgcggtctgccatctgcgcaatttcttcgttgtgagtgatcattacgattgtctgggcgaacttttgactggtgactttcaaaaggctcaatacatcctggctggttttggaatccagattgccggtgggttcatctgccagaatgatagcgggtgctgccgccagcgcacgggcaatggctactcgctgctgttgaccgcctgagagctgattgggcagcgcatccagacgatcatccagcccaagtgtctgtacaatctgctgtacgaaatccttattgaccttgccaccgtccagctcaatgggtagaacaatattttcatacacattcagcaccggaacaagattatatgcttggaacacaaagccgattttcctgcggcggaagatggtcagcgcttcctccctcagggagaaaatatcctgtccgtccaccatgaccgtgccacttgtagggcgatccagcccgcccagcatgtgcagcagcgtggatttgccggagccggatgtgccgacaattgcaacaaattcgcccttctttacacttaaatcaactccatccaacgcatgaactgcgttattgccggagccataaatctttctcaggttttttgcctgtaaaacttccataaatgagtacctccatgaaaaaatctgtatgtatgaaaggaaatggtcctttgatacatacagattatcgcataggaatctttccacattctttccggcggaaaatgaaatctaacagttttgatagaattgttgttatttcggcagaaatatggaaaacgtacttccttttcccggaacggaagcaaccttgatataaccgccctctccggatatgatctgtcgggcaaggtataagccaatgccgaccccttcttgtttctgcacactatttgagcggtaaaagcgagcaaatatcttcgcttgctcactttccgaaatgcctgtgccagtatccgatatatcgatcctttcaaacagttcatagcttatagcagaaatcctgattgtgccatgctctgtatatttgatggcattgtctacgatattagccagcgcttccgctgtccatttgaagtcgaatacagcaaaagcattggtatcttgcagttgcaaagacaatcctttttcagaagccttggcggcatattgttctactacgctttcaagcagcggctgcagcgctgcttgctgaggggagagtgaaatgatcccattttccagtctggaaagctttacgagagaatcgatcaaaaatcgcagcttttccgattgtttgtacaatgcctccacatttgccttcgttgatgcaggcagagtttcctccatcaaaagctcgctgtataacagcaggtttgcaatcggcgtttttgtctggtgggagatgtccgcaatcaaggttttgattttgtctttttcctgcgctacatttcgataagatgcttctgcggcggaaagatagtgcgcaaacttcgtttccaatgcagacagctggctttcatcaaaattggtttcagaaaaggaaccggtcatggcagcgtccagcatcctttcgatttcttccatcgtttttctggcctttctccgctcccataatacaacagctgccgccgccagaaaacacagcagtatgatcacaatgccggttttattcatcttttatcacccagctataaccgattccatagacggttttaatgtacttttgtgcaccaagcttatccctcagacgcttgattgtaacggacaaagcattttcatccacatattctgcgccatctgtccagatccggtcgacaaggtctccacgggtcatggttcgaccacgattttcaacaagcagacgcagtaatttttgttctgttttactcaattccacttttgaatctcccacataaaaggtcatagcctcaaagtcaaagtgaaatagatcaatatggatcgatacatttttatggtttgacgcttgctttcgcagttgggtattcacccttgcccgcaaaaccgaaagagaaaagggcttggtaatgtaatcatcagcgcccctctccagtccgtctacgatgtccagatcggtgtcattggcagtcagcagaataacaggaactccgggcatgttttccttgacttcccggagcagctcaagcccactgccatctggcagattgatatccaacaggattagggatacactaccgcaaagcaattgctctcttgccgcttttagatcatggcaggatataatctgacggtcatctgctttcaatgctttacttaaaccctgattcaaccctatatcatcttcaataatcaataattgttccatgtatctcactccttcgttattcaaatgccaccatcatttccttgggcaatttttttcgtttcgttttggatttctgtttcagccggacagcatgaatagcaccttcggcaaccagaagttcccagtcatatctggagtttttgattgttctgttttatgtggcaaagattgataagaaagctataaaaaagaggttatgcgcacatcacatgtgcatagcctcgctccattctttctccctgaatccggtaagtacaaagtcatctccgattaccagaggccgtttcaccagcattccatctgtagcaaggagtttcagctgctcatcttcagacatatcttttaacttatcttttaatcccatttccttatagatcattccgcctgtattaaagaatttcttcagtggaagaccactttttgcgtaccatttcttcagttcttcgtaagtaggattttcttctttaatagcccgttcttcataattgatattgtgttcgtccagccatttcagggctttcatgcaggtactgcatttgcggtaaactaaaactttcatagacattctcctcgtatagatttatcgtaactatttacaggtaattacttcctccattattgttccagatagatatatcataaattggaaagggcgattttgcaagagaatgttatggaagaattgtaaggttcaggttttcatgttaatatatccatatacaaaagaaaaaacagttccagttccccggagaggagaaatcatgcgtgatgagacgaagatggacgtatatacgtccggagtgactggcgcggagtatgatgcaggaatgaaacaacttatgagcaataaggagattatcattcccattttgcagatgacagtgccggagtttaaaacgtgctcacaggaagaaattctacagtgcttagacatttcttctattacaaaagatgatttcgtaagtgatataccaaatgtagaaaaggatctgagattaacaaaagaagacagtgaactctcatctcttgtggagaaactggtgaggtttgatattcggtttaaaataataaatccaaagttatctacagagaaaataagagtgaatttacatattgatatggaagcgcagaaaagctaccgtccaagtaatccgtcataccctatattaaaacgtgcagtatattatgtggccagagacctttcatctcagttaagtactattacgcagactacagattattcaaagttggaaaaatgttattccatatggatctgtgcagaggatgtgccaaagaaactgcagaatacattgacggaatactctttttcgaagaaggatattataggggtagcagatgaacctgaggaggattatgatctcttaacagtaattataatccgactgggaaaagaaacagaagaaaaaggaatatttgattatctgaaagggctttttactggtgatataaagagaatacaaagatattcacatatagaatggtcagaaccatttcaggaggaggcgagcaaaatgacaggatttggagatatgatttatgaaagaggaatacagcaaggaatgcaacaaggaatacagcaaggccgtcatgagggaatgattctgggggctctcatgagtggaaaaactccagaagaagtttcgaagatgttgaacttgcctctggaagaaataaaaaaagttcaggaacagcagatgactgtgaacaagtagtgaaagtaaattacagatataaaattaattgggaactgggagcattaatcaagctaatcataaaagaggctatgcacattatacgtgcatagctccttttgcgttggtatttatgcattgcgaatatctgcctgaaatcaattttctgattttaatgcgtcttccaggaatttcaccgcatctctgacacagtcatcacaggagcggattacctttccggtttccacaccctttaagtctttacatattacagttccattctgctgtttaaactgattcatgacagagcggacagtctgagaggttccggctttgtcctggttaataagtccagctacaactgcagcaccggagattgctccgcatgtaccggccatagtgccaagacctgcaccgaatccctgtgtgatctttttgagtgtatcctcatccatagatgcctctttacagaaagaacaggccacagcctgtgcacagttatagccgttatgtttcttttctactgctttttcacatcttaaatttttcatatataaaatcctcctgtgtataaattttaaccgaatcaagtaagtcccctgcttgacttgcgaaaagtaataagcagtgggtggggacttgaagatatagtttatgatagcaccttgaacctgtttttacaaccttcacaaaaattttcaatttacaaagattttactttagcgtggttttacatttaactttggatttctataatagcacttgtaaatgaggcaacaagttataaaacataaagatattaaaaaggaaatgagcctttcactttatattaaaaacatggctcatgggaagaggagaaaattatcatgaagaaaaaaatcgcaacaatccttacagcagcagttatcggagcaacagctttcacaacaatcgtaagtgcagcaagcggagacatcacagttgtatcccgtgaagatggttccggtacacgtggagcattcgtagaactgtttggaattgaagaagaaaaagacggtgagaaagtagatatgactacagatgaagcaagtgtaacaaacagcacatctgttatgatgacaactgttgcaggtgatgaaaatgcaatcggttatatctcacttggttctctggatgatacagtaaaggcagttaagatcgacggtgtagaagctactgtagataatgtttccaatgattcttacaagatcgcacgtccattcaacatccttacatctgataaagaaagcgatgcagcaaaggattttgtaaactacattatgagctctgacggacagaagatcgtagaggacaacggatatatcaaagaagcagcagatgctaaggcttatgaagcagcagacggagtttccggtaaagtagtagttgcaggttcttcttcagtaacaccggttatggagaaacttgcagaaggctatgaagcagtaaacaaagacgtaactgtagaagttcagcagagtgattccacaacaggtgtaaacatggcagcagaaggaacagcagatatcggtatggcatcccgtgacctgaaagatgaagagaaagaccttggtcttacagctacagttatcgcaagagatggtatcgcagttattgtaaacaaagacaatgatgttgatgaacttacaagcgatcaggtaaaggctgtatacacaggcgagactactacatgggaagatcttgctaaataatgtaacagatttagtttcagagcagttcgcctgtgaatgaaatagtacagcaggcgggctgtttgcatgttgaaaatcatattttcagaatcactgtaaaagtgacaggttatgatttttgatacagggaaagaaaggtgtaatgaatgaaccactttaaagaaaaagcaatgaaatgtgtatttctgatcgcagcctgtacttcagtgttggcagtgtttctgatctgtgcatttctgtttgcaaatggtgtcccggctatcgggaaaatcggtccgctgaagttcctgctgggaacaaagtggaagccgtcaaatgatatttttggaatccttccaatgatcgtagcaagtatctatgtaactgcaggtgccattctcctgggtgtgccgattgcactctttacttctgtttttatggcacgttactgcccgaagaaaatttacagaccattgaaatcaggaattgaattgatggcaggtgtaccttctattgtatatggtttttttggcctgattctcattgttcctctgatcagacagattttcggcggaacaggaaccagtatgctggcagcctgtgttctgcttggaatgatgatcctgccgactatcatcggagttacggaatctgcgatccgcagcgtacctgagagttattacgaaggttcactggcactgggagcaaccaaggagagaagcatcttttttgtcatgcttccggcagcaaaatcaggtattctggcagcagtagtacttggaatcggtcgtgcgatcggtgagacaatggcagttgtaatggttgcaggtaaccagccgagaatgccacagggaatcctgaaaggtgtccgtacaatgactgcaaatatcgtcactgagatgggttatgcaacaggtcttcacagagaagctctgatcgcaacagcagttgtgttatttatctttattcttatcattaacctgagtctttctttactgaacaggagggcagaacatgcaaattgatacagcagcggcaattgatttgtccaaagaaaaaaagcagaatgagtcttctttctcagatcagatgaaggcatatattaagcatccgggatcaggtgttcttgcattgcttacccttttaggtgcagtcctgacatttgcattactgttctttctgatcggatatattctggtcaagggcgtaccgtatctgtcaacagacttgttcagtttaacttataattcagagaatctttccttacttccttctctgatcaacacattcatcctgacggttgtttcacttgtaatcgcagcaccgctgggaatctttgcagccatctatctggtagaatatgcgaaaaaaggaagtaagcttgtaaatgtgatccgtattacagcagaaacactttcaggaattccttctattgtatatggccttttcggtatgctgtttttcgtaacagcactgcattggggactttctcttctgtccggtgctttcacattggtaattatgattcttcctctgatcatgcgtactgcggaagaagccctgaaatctgttcctgattcttatcgtgaagccagctttggacttggagcaggtaaacttcgtaccatcttcaccattgttctgccatcagcagtacctggtattctggcaggtgtgatcctggccatcggacgtgtgatcggcgaaacagcagccctgatttatacagcaggtacagttgcagaggtaccgaagaacttgatgggttccggacgtactctggcacttcatatgtatgtgctgtcaggtgagggccttcatatgaatcaggcatctgcaacagcagttgttattctggcatttgttcttgtaatcaatttcctgtccggagcagttgccaaacgaattgcgaaaggataagaaaaatgagtggaaatgaaaaaataacagttgaaaatatgaacttacattacggaaagtttcatgcgctgaggaatataaacatggcaattccggagaaagaaatcacagcttttatcgggccgagtggctgtggtaaatctacacttctgaaatctttaaaccgtatgaatgaccttgttgagggatgtgtgatcaccggtaaggtacagcttgacggtgaagatatttacggagatatggatgtgaatcttctgagaaaaagagtgggaatggtattccagaagcctaatcctttccctatgagtatttatgataacattgcatatggaccgagaacccatggaatccgttccaagtctaaactggatgatattgtagaaaaatctctccgcgatgcggcaatctgggatgaagtaaaagacagattaaagaaaagcgcactgggtatgtcaggcggccagcagcagagactttgcattgccagagcactggcagttcagccggaggtacttctgatggatgagcctacatccgcacttgaccctatctcaacttccaagatcgaggagctggcgatggagttaaagaaggattataccattgttatggtaactcataatatgcagcaggctacacgtatttctgataaaacagctttcttccttctgggagaagtagttgaatttgatgatactgataaactgttctctatgccttctgacaagcgtacagaggattacattacaggaaggtttggttgattatgtcaaagtatttcgaaagacagctggaggaactgcacgttcagcttatcacactgggaagctattgtgagaaagcaatttcattctctgcaaaagcaatccagaaggtgcagaatgaagagattgcccgccaggtttttgagacggacagagatattgatgccaaagaaagagagattgagaatctgtgcctgagtcttctgcttcatcagcacccggttgcaagagatttaagagagatatctgcagcattgaagatggtttctgatatggaacgtatcggtgaccaggcagcagatattgcagatctgtctttgtatgttgcaaagaatactactgcgattccggagactatcacacagatggcggaggacactgtgcgtatggtaactgagagtgtggatgcttttgtaaagagtgatctggagttgtgcagaaatgtcattgacagagacgatgtggtggatgatgcatttaatgagatcaaagagaagcttgcagatatgatttacggaggaaatctggatgccaagacagggctggatcttcttatgactgcaaagtactttgaacgtatcggtgatcacgcagtgaatattgctgaatgggtggaatattctattaccggacagcacagaaataatgagcatcaggattatctgaataattaattgaatagagaaagtctctgattttgaatataattatttggaagcagggctttttatatccgcaggcgggaaccgtttgcggatatttgagttattatatatctcaatcggagaccgatatctgcctgaggtattaaataaaaaggggaagtgaagagaagtgacaaaaaaaatctttaaatctataatgtttgtatgtgcattggttctgactgtgggactggctgctgtaatgggaatcctttacagcaattttgacggacagatgcgcaaagagctgtctaaggaagctgcttatctggcatatggtgtggagcaacagggaacagattatctgaagaatgtaaaggataagagctcaaggattacttatattaataaggatggaactgtgctttttgataataaggctgatgcagatgaaatgcaaaatcataagaacagaactgaatttcagaaagcagagaaatatggtgcaggagaatgttccaggtattcggatacactttctgagaaaacaatttattatgcactgcgtctgaaggatggaactgtgctgagagtttcaggcactcaggattctgtgctggcactggttgaaaatcttcttcttcccttatgtggactcttatttctgatgctgattctatcaggaatcatggcatctgtgatatcaaaaaggatcgtaaaacctgtgaatgagctggatctggagcatccggaggagaataagatttacgaggagctttctccgcttttaggtaaaatccataaacagaaccggcaaatccagaagcagctggaactggcaaaacagcagcaggaagaattctctcttattacagaaaatatgcaggaaggtctgatcgtgattgataggtataccatgattctttctgccaattccagtgcatggaatctgttccgggtagataaagtatgtcagggagaaagtgtttactgtctggatcgtgcggaagatttcagacatgcgatcgagcaggttctcagcggagaacatgcggaactgatattgaaattaaatggaagcgatatccagttgattgccaatcctgtggtacgtggacaaaaaacagaaggtgctgtgatcctgcttgtgaatgtgacagagaagcttgagagggagaatctgcggagagagttttcggcaaatgtctctcatgagctgaagactcctctgacttctatttcaggatttgcggagatcatgcagggcggtctggtgaaatgtgaggatattcccaagtttgcagggcgtatttataaggaatcccagagactgcttcagctggttgaggatgtgatccagatttcccagcttgacgaggaaaaaacatcctacacctgggaactggtggatgtttatcaggtttgtaagaatgcctttgaaagtctgaaggagaaagcacagagcatgaatgtgcatctttatatctgtggggacagtatgaagatggaagcagttcggacacttctggaagaggcagtttataatgtctgcgataatgccattaagtataaccgaaatgatggaagtgtaagcatttttctgactcagactgcacatgagatacagattgtagtcaaggatacaggtgtgggaattccaaaggaagatcaggatagagtttttgagagattttacagagtggataaaagtcattccaaagagattggaggtaccggactgggactttctattgtgaagcatgcggtcagcactttgaatggaagtattgtgctgagaagtgaagaaggaagtggaacggaaattactatgaaatttctgaaagtgcataaggaataaaatagaatagatacagaggggatgtcagtttgacagcccctctaaattataccgtagaaagaacctttttatttttttcgatattcattgggggtgcagccgaccacatctttaaacagtttggaaaagtaggaataatttccatagccgactttcaaagcaactgttccaaccgggatgtcagggttgagcagaagctcttttgctttttctaaccgataggtggtgatgtaattgatgatagaggtctgcgtttgttttttgaaaagtcgtgccagataatctggattgagataaaccatatcagccagcatggtacgtgagatatcttcggagtagtgctgatggatatagttgagtacaatatcaacgacggagtctttttcgttgatgaagctattgtattctacggcgcgttgtatcagatagcgcagataattaaacatatatggtacagcgtccagagattttgtgatcagttcgtctctttcttctgaagaaaatagagtgtgtgcttcgattccgtttttatgtagataggaaaaaacaatttgttcgatatcaagtctcagatgcagaagaaaatttttggtgataccactggcctgaatgtatttggacaggtaattttcgatattctgtaaagctgcgtctgcctgtttttgttccagaaaagtattgattacttccagtgatggagggatgtaggaagttgtgctgggaacaaaatcttgcagaaaaagtggtttatttacggagttaaggttggattctctcatttcacgtagtctggtaagagtttcaggcagttctgtcagggaaacctctggtgcaatgccgcatgcaatttcacagtgcagaaaactctgaagatttttgaacagtgtcagtagattttctgtaaatggctgacggatttgttccagttgcaatccagaaagtatgacaacgtattcaaaggtgttcagtatcactatagactcatagagaatgcaggatttctgaaaggtttcggctgtaatattctggaaagaaaaatctaccatggaagactccatgggcattatctggccggagagtggataaagccggaacaaaacaggaatgaagaggtcatctgctgtataggaaagatctttttttcttaattctgtttcaagaagagaaggttcacgaaacagagtggtggcaaaaagttctttccagaataaatctacaatatagcggtaattatctttccatttctgactgtctgcttttgtctgggtgagcgcagcattctttctgactttagaaactgctttttccagaatatggaataaagtatcaaagtctataggttttagctggtaatcgagggaggacagttcgatagctttttttgcgtaatcaaaatccgcatagctggtcaggaaaataaattgtatttcttttcctgattcccggacccaggaaagaagatcaagaccagaaccgccgggcatttcgatatcgcaaacacagatatcgatggagtttttttctatgattttctgagcttgacggatattgaaagcagtgagtacttctgtgattgttagttgctcccagtttatttttttctcaagggccgctacaacaaagcggtcatcatcaactaataatgcgttcataaaactttcctttcataaattaggcagagaattggatcagattgcagggagaaggatggttacgcaggcacccccagacgggaggtttgagaaagtaatgaccgcttctccctgaccgtacagcagattcagacgttggatggcattggtaattccaatacggtgaccattttgaggttccagaggaatagcagaatttagggattgcaggatgtcttccgagaatccgcatccagtgtccatgacctgaatctgaatattttcatgtgaatttccgccggcagtcatccaggcgatgtctgtgcgtatgattatggggtcatcaaaagtattggagtgtttgatggcgttttctataaaggtctggatcagaattggtgggattcgtatgttttctgtaccttcttctgcgtgaatttcataggagaacgtatctccgtaacgcatcttttggatttccatataattttttatatgttccagttcattttttacaggaacaagatcctgggtgttctggaaaatatatcgaaaatagttggaagtaatcatagacattttcatgatctcttcgtaaagctgcgtctgtgccatactgtaaatggtattcagacagttcagaaaaaagtgaggacggatctgtagctgaagataattcatcattgttttttgtttttccagttctttttcgtaaatgtcaattttcagttttttgatctggcgcatcagatttttgaactgggagttcgcctgctcaagttcgagaagattggtgtcttttaaactgatggtttctgcagaatcatccagatgtgccagattttctaaaaagagcttgatcggagtcagaacgtgtttcttcatatagaaaatggaagtaaacaggataactgcgaccagaaggactgccagtacaagaataaactgaagcaggattattttttcataagccctgaatttgctgagaataatctgaggataaaaagcacccataatcagagcaccgctgataatcagattatttcccttattataagtctcgtaagaatcggaattgctttttcttgaaaattcaatatggtgttgcttcagcagttctttattagtaagtacggttccgttttgcgaggtaagagaaatgaaaccgtctttttctttaattatgttttttagtggctgaatgatattgtcagcaggaataaaacagcaggcgtagtgggagcctgtatgaaaggatttgtaaaaatatacgttctttccgaacattagtacttcccaggcatccgtgtagaaacttgttttgggcgcagttattttttgaatcagatgcttgttcagcagtacgagctgattctgagtaagtgtctgaaaaatttctgtaggacgatacatccgttcattctctgaattatatagaaaaatctgatatcctttttcaaaagattccagaaaaatatcaatattattatgaactcgttctgcggatgaaatgaattccagtttgtcctgtgtttccaacagagtatctgcatcgtcattttcagtcaggagccggattaaatagcgattgatggaaatatgtgcggtgtcgatttgcgaagcataaagggatgttgtatcttgcagggactgaatactttgggaacgcatggaaaaaatgacaaaacagctgatcatgatatccaggattacaaccggaaccagcagaaaaaacaaaaattttatgacatgatcaatggagtatccggcaacacgatgtctggaatacatataaatacctcctgaaatattataaaatcattatgatgaaaacaattataacaaaaatccgataaaaagataataatattccgaccttttgatacaacaaaagagacaagctatgaaaaaagaaatcggatttcggaaagtgtgaggtcgttattttactattaaaatactggaaaatctgtataatgagaaacatcagacagagagatgtatacatcaaaaaaaattaaaaaggaaaagaattgaggtaaaaggatgaataagaaagtgattgcagcgggaatggctatggtactggcttctatggggctgactgcctgtggcgattccggttcaaaagaggctaaagattcttctgatgagacttatacagttacaatggcttatattggagataaggaggaagatacagatcgcatcgagaagaaaatcaatgagattatgaagaaagatatcaatatggaactcgatatcgaaccgatcagctggggtgcctatgcggaaacaatgaagctgattctatccggtggagaaaagatggacattgtaccaatcctggtggaacaggttaattccatggtgaatgcgaagcaggttattgacatgtctgaatatatcgacaaatatggcaataatattaaagaactgcttggtgatactgcgaaagcagcaaatatcggaaattatgtatacggtgtgacaacaggacgcgaatggttctgccagtcatctgttattatgcgaaaagatattctggatgagtgtggaattgatgtatcttctatcacagattataaagatttgactgacgtttatgcaactgtgaaagaaaaatatccagatatggtcatgatggcaagcaataacagtgcaacaccggataccaaatatgaaatgaatgatacacttactgatggatttggtgtattgatggatcatggtcaggatacgacagttgtagattattatgagacagatgaatataaagagtttgtagaaacaatgtatgactggcagcaaaaaggttatttgtccaaagatgctgcaaccacaacagagagtgcggagaatcaggtaaaagcaggtgccgctttttcttaccttgcaccaaacaaaccaggatatgatacccgtgccgctttactttgcggaacagagatggagattgctccgatttccgaaccatgggctggtactgcacaaatttcttacctgacttatggcatcagttcaagttctgctgataaagataaaacaatgcagtgtctggattatttatatggaaatgcagatattctgaacctgttgaactggggggaagaaggtgttgattacgaagttgtagatgctgaaaataatatcattaactatccggatggaaaagatgacagcaacacgtatcatctggcagaaggatggcagttatttgaccagtttaaaatgcatatctgggagggtgattcaccagatatctgggatgaaacaaaggcactgaatgagagtgcaatcaaatcaaaagcattcggatttacctatgattctacaagtgttgcaaacgaactggctgcactgagtaatgtaaaagcaaaatatgcagctgctcttggttctggtacagtagatcctgaagaaacacttccgaaatttattgaggaactgaagaaagcaggaattgagaaagtgatcagcaccaaacaggaacagctggacaagtggctggaagagaataaataacacagacaggggatgccgctatgcatcccctgttatattccagataattgaaaggaaaaatttatgaaaaaagcaaaatttaaaagatgggtaccgctttatctgatgatggcaccggggctgatttatctttttatcaataattatatgccgatggcaggacttgtggttgctttcaaaaattacaacgtggtagatggaatctttggcagcccatgggccggtctcagcaattttacttatctgtttaatgatgcgtggacgattacaagaaatacgttgctttataatattgtatttattatcatcaacctgattctgggaattgcatttgccatctttatctgtgatattcggagcaaggcatgcaaaacaatttatcaaagtgcaattttactgccgtttcttatgtctattgtaattgtaagttatatcacttttgcctttttcagtggggacaatggaatgctgaataagacaattcttccgtttttcgggaaagaagcaattaattggtattcagaatccaaatattggcctgtgatcctggttatcgtaaatacatggaaaggtgtaggatatggatgcctgatttatatttccagtatttccggaattgatccttctttttatgaggctgcagaactggatggagcttcaaagtggaaacagatccgatacattacacttccatcgatcatgccgtctgtaatcactttgacactgttaaacattggaagaattttctattctgattttggattattctatcaggttacacaaaattccggtcagctttatgataccaccaatgtaatcgatacttatgtatacagggcactgcttcagtccggaaatatcggaatggcttcagcggcaggcttttatcagtccattgtcggatttgcctgtgtactgctggcaaatgtggttgtgcgcaaattaagccctgaaaatgcaatgttctaggaggtaaaaaatggttagaagcaaaagtgcaaaaagatttgaacgattggcacatacggtcatgatactggttacaatctgtattgtattgccgtttatcttgttatttatgtcatctattacctctgaaagtgctctggttagagatggatattccttttttccaaaagagttcagtattcatgcctataagtttatctgggataatgctgcaaatgtattcagggcatatggaattacaatactggtcactgtaataggaaccagtattaatgtggcaatgtctgcattgttggcgtatccgctttccctgaaaaatcttccaggaaaaagaatcctgaatttctacatattttttaccatgttatttaatggtggactggttcctacatatctcatgtatacaggaattttccatatcaataacacactgcttgcatatattgtgccgggacttctgatgagtgctatgaatgttatgctgattcgtacattctttgcgaccagtattccggatgcactttttgaagcagctcagattgacggtgcaagtcaattccagatttttttcaaaattgtattgccactgggtaaacccattcttattgccatgggtctgctttccggattaggatactggaatgactggacaaatggtctgtactatattagagatacgaagttatatggcattcagaaccttctgaataagatgatttcagatttgacagcactgacacagaatgcttctggtgcgtcaactgttgcaattgcagatattccatctgcatctgtcagaatggcaatagcgtttgttgcaatgctaccgattttatgcctgtatccgtttttacagagatattttaccaaaggtatcgcgcttggtgccgtaaaaggctgaagatgttttgaaggaaaggtggattattttcctgtaaatatttagtgttttcagcaaagattttttctgataagatggggaatagaaagtattggggaaaaacggtcggaacgatcattgcatcgcttgagagatgttgttctcagaaagaaaggataaaacatgaacgattataaattggatttagagaaatatgcaacactggcgagacaggcagccgcagagggatgtgtacttctggagaatgagaagcaggcacttcctttgagagagggagagagtgtggctgtttttggccgcatggcatttcattattataaaagcggacttggttccggcggtctggtgaatacgagatatgtagtgggaattctggatgcgctgaaggagtgtaaagagattcaactggatgagaaactgctgggtatttatacaaactggattaaagagaatccttatgatgaaggtcagggatggggtcgtgttccgtggtctcagaaagagatggaagttacagaggaaatgctggactgcgcacgtagcaatgatgtttcgcttgttattataggaagaactgcaggtgaagatcaggataataatatgaatccgggaagttattgtctgacggagacggaggaggatatgatccgccgtgtctgtgaggtgagtaagcgcacagttgtggtgctgaatgttggaaatattattgatatgagttgggtggagaaatatcatcctcaggctgtgctgtatgcatggcagggtggtcaggaaggtggcaatggtgtggctgatgtgctgaccggtaaagtgtgtgcatgtgggaagctgacagataccattgctgagaggattgagtattatccgtctacggagaattttggtgatccatataagaattattataaggaagatatttatgtgggttatcgttattttgagacatttgcgaaggataaggtgctgtatccgtttggatatggtttgtcctatacgaattttgagacaaaggcggagatttttaagaatactgaggatgaactcacagtggctgcaacggttaccaatatcggtgatgtgaggggcaaagaggttgtacaggtttatgtaaaagcaccgcagggtaaacttggaaatccggcaagaaagctgatcggatttgcaaaaacccgggaactggcaccgggtgaaaaagaagaacttgttatcatcattcccaaatatgatatggcctcttatgatgacagtggagtgacaggacacaaatcctgttatgttctggaagagggaacttatgaaatttttgcaggcagtgatgtaagaagtgcgaaatcagcaggaatttacgaagaagaattacgtgtaatagaacagttacaggaggcatatgcaccgattgagaaattccggagaatgaaagccgttctgagagcggatggaacttatcaggcagtaacagaagaggttcctgtccgcacagcagatccacataaacgcagagaggaaagaatgccgaagactctggagtatacgggagataaaggctataagctggcagatgtactggataaaaaagtttctatggatgagtttgtggcacagatcagtgaggcggatctgattgccatgttccgcggtgaaggaatgtgcagtccaaaggtcactgctggaactgcagctgcatttggcggtgtgacagagtctttgaaggctcttggaatcccggtgggatgctgcgcggatgggccgtcagggattcgtatggattgcggtacgaaagcgttttctctgccaaatggaactttgctgggctgtacttttaatacggagcttgtgggtgagctgtatgaaatgacagggagggaacttcgactgaataagattgattccctgctgggaccaggtatgaatattcacaggaatccactgaatggtcgaaattttgaatatatttctgaggatccgcttctcacaggaagaatttgtgcggctcaggtgaaggcaatggctaaatccgaaattggaagtacgattaagcatttctgcggaaataatcaggaagtgggacgaagtacttctgattctgttatgtctgagagatgtctgagagagatctatctgaagggatttgagattgcagtaaaggagggtggtgcacgttctgtaatgactacttatggaagtgtaaatgggctctggactgcaggtagctatgatctgtgtacaaccattctgagaaaagagtggggatttcagggtattgtcatgactgactggtgggcgaagtccaattatgagggtcatcaggcagaggtaactgcgaaagctcctatggtagctgcccagaatgatatttatatggtagtgagtgatgcgaagtccaatccggagaatgacgatgtggaggaaatgcttcatgcaggaaaaattactgtgggagaattgcagaggaatgcagccaatatcctgggatttctgttaaaaagtccttctgttttattgttgacagacagaatatgtaaagaagaactggaggctatgaatacaaaggaagaggacgatgtggatgccggaagtctggtaagtattgaaagtgattcggtgacacagaaaattgtaattgacggtgcattattacatcctgcaaagggaatggcagatgtgattgctgtgactaacgagttcatgggtgatttcacaatgaagtttactttgaaatctgatcttggtgagctggctcagcttccggtttctgtatttttggataatattcataagatgactgtttcagtacagggaaccaatggaaaatgggtagaagaaagccgcatcctgaatatggaatttggtcataatcactatatcaaattttattatggtgcggataatcttgaaattaaagaaattgtgctgattccgaataggtaagaccaattttaggaacgcttgcaaaactatatcctttatggcataattatgaaaatactcagaacctgcgaaagatgagtgataattgctttataaaagtggttatctgtggacttttttaatgcggagcgggctgttcagaggaaaagtgttactgatgattagaacagtgttaagagtgatgaggaaaagataatatgtcaggttttacaaaggaaattattgcaaagacttttacagaattgctggatgaaaagcccatgtctaagattacggtgaaggatatcgtggaacgatgtggtgtaaacagaaatactttttattatcattttaaggatattccggatgtagtggagtttattttgaaaaagaagtgggatgagattctggaacacccacaggacagagcctctattctggaatgtatggaagaaatggcagatctggtgagaaataacagaaagattatgcttaatgtttacagatcagtgaaaaaagatacgtttcttttttatatgaatgagatttccaactatattattatggaatattttcggaaaaatgcagatcagtttgatcttgatgagggagaaatccggattctgattcaatattataagtgtctgtttatgggatttctgatggagtggctggataataatctgaaatctgattttggagaagaaatgcgtcaggcttcccggctttttgaaaagcacccggagctacatgcggtattgaacagatcagaatagagtgaaaatacctgttgttcctgatatttattatagcaattctcttaaatgtattatctgagagaagcgttataggtaattcctttaattttcatattatacaaaattaagcttatgtctgttttttggacatgggcttttttttgtctatttattgttaaaaaaatcacagctataatagcagccataaagagatgaaaacaagagcctgacagtcacaggttcgggtatatttcagaagggaggagcaataggatggatgcactgaagcagttaaaattagccaagaatggttatattattatgtctgtattatttatggttctgggtgcctgtctgattatctggccggattgttcgatggcagttttctgtacagcagtagggattatgcttattgtatacggattgataaagattctgggatatttttccagagatatctattgtctggcatttcagtttgatcttgcctttggagtgctgctggcagcagtaggaattattattatagtacgcaggaacgtagtggtgaatctgatctttggaatctttggacttctgatccttgcggatgcattatttaaaattcagatgtcgatagatgcaaagaaattcgggctgaatctctggtggaggattctcctggtagcgattctgaccggtgttctgggatttttacttttgataaggccgtttgaggcagcagagatcatgatgatcctggttggtgtttcggttctgtttgagggaattctgaatctttgtgtggcgatttacactgtaaaaattattaaaaaccagaaacaggatatcatagatatggatgaatattgataaaataataaaaatatacctgatacacaggtgtttatatatatcacattacaacaaggaggagcaatcacatgaaattaatggacaaagcaaaacaggctgcacttgtagcagcagttaaaacaggtctgggatatctggaaaaggatccggaagtaaatataccgaaactgatggaacttgtagataaatttgtaccggatggctggtatgagtcacagagaaatgcaatccgtaatgcgattcaggataaggacagtaactggtataaactgatcctgaggatttatgagctggatccgggagtacgtgaagcattctttacaaactttattatcaatgccagcttaaagggaagtgcacttcaggaagaaacagcagaagagaacaactgtaatgttccatgggcaatccttcttgatcctacaagtgcctgtaatctgcactgtacaggatgctgggcagcagagtatggtcacaaactgaatcttgattttgacaccatctgttctattgtagagcagggcagaaaaatgggaacttatatgtacatatatacaggtggtgaaccgctggtacgtaagaaagacctgatgcgtatctgcgagaaatatccggactgcgagttcctttcctttacaaatggtacactgatcgacgaagagttctgccaggaaatgcttcgtgttaagaactttgttccggcgatcagcctggaaggttctgaggaagcaaacgacggacgtcgtggagaaggtgtatatcagaaagttatgcatgcaatggaacttctgaaagctcataaacttccgtttggtgtatctacctgttatacttctgcaaatgtggacagtgtaagcagcgaggaatttttcgatcacattattgactgtggtgcattatttgtatggtttttccattatatgccgacaggtaatgacgctgtagtagaattaatgccgaatccacagcagcgtgagaagatgtatcacaagatcagagagtatcgttctacaaaagctatttttggaatggatttccagaatgatgcgcagtatgtaggaggatgtattgcaggaggaagacgttaccttcatattaatgcgaatggtgatgtagacccatgtgtatttatccattattctaatgcaaatatttatgaaaatactctgctggaagcattgaagagtccgatcttcatggcatatcatgacggtcagccgtttaatgaaaatatgcttcgtccatgcccgatgcttgagaatccgcagaagcttcgtaagatggttgaagaatccggtgcgaagtctacagatttgcagtctccggagtctgtggagcatctttgtgcgaaatgtgatgcttatgcagaacattgggcaccaaaagcagaggaattatttcctgtaaaaaataagtaacttaataataagaaaaaatattaactcaaaatttagccaaagttatcagagaaagttccctgtccggtcatcccctgtccggatggggaactttctcgtctttgaataaggggacgcgcgaaacagcatctctctgtgggttcagttccgggggctaagtaactctaaggtggagaaaatccgctaaaagcatgaagaaaaacgcaaaactcgctccgttgcaaacttcgctcagacaggttgctgcttttcttcataacgcggattttctccgcctaagagttactaagccccctccagattcacccacagagagatgctgtttcgcgctgttgattgattgtggaaggaagtgtgtgaagcattttattgttaaaaataacttgcctgagtgtgcgacatgtattaaagttatggtgttaacctgtatgatggatatgtagaagttctcgtaaatcatgtatttaagaggattgctgtagattttttagtatgagagagtggtagggatgttaaaaacttttttggtagaggatgaagttgtgatcagggagatgattaagaagatgattccctgggagcagtatggatttgaactggcaggagaagcatctgatggggagatggcgctgccattgatattaaagagcaaaccggatcttctgatcactgatattaagatgccgtttatggatggtctgacattatgtaaattggtgaagaaggagttgccggacattaagattgtgattcttagtggctatgatgactttaactatgcgaagcaggcgatcaatattggtgtggaggattatctgttgaagccaattactaagaatgcatttattgagcgtctggaggagattcataatcgttatgaacatgagaagacgcagaaggaatattatgagaaattcaaactggagatgcaggagtatgagaggaatgcgagccgtgatttctttgaatctctggtgagagcggactttgatctggaagagatttatcggagagcagatcgtttgaatcttgatattgtggcagaggcttataatattctgatttttacaccggatgcttcagacagcagttataattcgtcggaaggatattcagactgggaggcagaagtacataagaagattgagaattatttcctcagtcatccggttgcgatgcttttcagacatcaggtgtttagttatgcgattctggtcaaggggcagcgagacacgataaagaagaatacatgcgaatgtgtggaaacaattcagaagatcatggaagaaaccagagcaaatgtggactggtttgtggcagtcggcgaggaggcagaccgtctgagcagaattaagcagagttatcacacggctgcaagaacttatgcattccgttatctgtatgacgggcatattctttattacaatatgcttgagcaggtaaaggagaattcagcagatacttcaaaaacagaagctgttcagcttaagaatgtgaatatcaatgccctgaatccggaaatccttcagaaatttttaagcagtggtctggaagatgaagtagacagttttgtccatgattatttccatgctattggcagggaaccgatgaaatcactggtgttccgtaattatgtggttttgaatgtgcgtttttctgtactgtcatttcttaagaaaattggatatgatgatacggaattgtccagagaagagacagatgatgttgtgaagaagacaagccagtctacagaagcttctgttgcatatgcagaggaagtcttgaaacgggccattgcaatccgtgatgaaaatgcaggcagtcagaacagaagtgtgttgaagcaggcaatagattttatagatggacattatatggatgaagagatttctctgaatagagtggcgcatgcggcgaatgtgagtgccaatcatttcagcgcgcttttcagtcagaatatgggacagacatttattgagtatctgacttcgcttcgcatggacaaggcaaaggagctgcttcgctgtacttccaaacgttccagtgagattgcaggggaagtgggatataaggatgcgcattacttcagctatctttttaagaaaactcagggaatgactccgagtgagtatcgtaagacgagaggagaagtctgattcatgaagcagaaacaggagaagctggaaacaaagatgaagtggatgcttctgagcactatgatccctatgacaattctgatcatagtgcttcttgtttttttctggcattatacaaatgaatataatcagttgtctaataatctggcggtgagttcggaatataatgcaaactatagaaattccaataatgatatgagctttaaagatgaagtggatatggatatctattatgtgactatcgggcgaaaaggtaaggacgggctgccgacagagcaggtagacaaggcaatcagtactgtggagagtctgaagaaaaccacatcaaagaaggaaagcctgcgttctctgaaatatctgactaactatctggagaatcttaagaaacggatgaatcagcttcttgagataaagaattatcaggaacgacaggaatttgtggcaaataatacagaaatcctgaccacgctctttgagaaagaaatgcagaattatatttatcaggaggcgacggaactggtgcagatagagtctcaactggctggaaatgtacgtctgacgatcatcactatgtgtgcggcgattttggttgctacggctattctgttgcggcgttctttccgtctgacatacagcattaccaaaccgatttctgaaattctccataatattaagaaggttggaaaaggagagtacaaaactattaatgtagtatctgccgacagtgttgaaatccaggagcttgatgccggtaccagaaagatggcaggaaggattgaagggcttcttgagaatgtgcgtaaggagcaggaggtacagcatatgacggagctgcagctgatccaggcacaggtaaatccgcattttctgtataatacactggacactattgtgtggctggtggagggtggtatgcagcaggatgcagtggatatgatcacaagtctgtctgtttttttccgcacttcgctttcgaaggggaaggatatcattccgctgtcggaagagaaacgccacacattgagttatctggagattcagcagtcaagatacagggatattatggaatttgagattaatattccgccggaactggatgaagtgatggtgccgaagcttactttgcagccgttagcggagaatgctctttatcatggaattaagaataagcgtggaaaaggtaagattcttattgaaggattcaatctgggagatgatatgatgctgagagtgactgacaatggtcagggaatgacaccggaacgtctttatgaagtacaggaagccatccgcaccggtgaacgtgccgggttcggacttgctgcggtgtcagagagaattgtactttattatggtccgggttatggactgaagatttcttctacagagggagaaggtacggttatggaagtgtatatggcgaaaaaaattaacctggataacaattcaagataaacaaagaaaaagctgcatgaagttaagaatcttaacagatatgcagcttttgttatgtattcaggtggataaagtcaattattttattgtttattcatatccaataacagttttatggcctgctgatagagacttacgaaggtctgccaaataatggaatgtatgaattatgtcgactaatgctggattgtgcaaagtgaatataaaagaaagttgataatttatttctgtatttataatgcacaataaaaaatccaacttccgcaataaaaaaataaactttgtataaattatgaacaaaatatgatagaagaataaactttttgcggaaaatattctatggaattttcctggatttttactataataaagacatcttaaatgaatcgggaggatttacaaaatgaagaaaaaaatcgtgtcagctttattaacagcaacaatggtatgcggtatgagcgttgttccggcagtgggtgtagcagcagcggacgacacaatcacagttggtttctcacaggtaggtgctgaatctgactggcgtacagctaatacagaatccatgaaatccacattcagcgaagagaacggatatgaattaatcttcgacgatgcacagcagaaacaggaaaaccagttaacagcaatccgtaacttcatccagcaggaagttgattacattcttttagctcctgtaacagagacaggttgggatacagttcttcaggaagctaaagatgctgatattcctgtaatcatcgtagaccgtatggttgatgtatctgatgacagcttatatacaacatggatcggaactgactccttactcgaaggaagaaaagcagctgaatggctgaatgcatacacaacagctaagggaatcgatgcaaaagatgttaacatcgttgatatccagggtacaatcggatctacagctcagattggacgttctaaaggccttgaagaaggtgttgacaactatggatggaacttacttgctcagcagtccggtgaattcacacaggctaaaggacaggaagttatggagtccatgctgaaacagtatgacaatattaatgttgtatactgcgagaacgataacgaagcattcggtgctatcgatgctatcgaagcagctggtaaaacagtaggatctgatatcgcaaacggtgaaatcatggttatgtcttttgatacaacaaatgctggtttaacagatacattagccggcaagatcgcatgcgatgttgagtgtaacccattacacggaccacgtgcagaagaactgatcaaagctcttgaagctggtgaagaagttgaaaaactgaactatgtagatgaagaaatctttgctacagatgatacagttgataaagttaaagctgtaaacagtcttgatgaagagggcgaatatgacgtaacacctatcacacaggaaattattgacggacgtgcatactaatttttgacaacatataatagacgtgtaatagaagaaatataaacaatccggagcgtggttcataattcggagaaacccggatttatgaatcacgctctctttatgccgaaatgatttacagatacccgctttactgaagcttttcagtaaatgaggggtaaaccagtttagaaagcaggtggaaagaatatggaacaaaatgtagtattggaaatgcgtgatatcagcaaaaactttacaggagtccgtgccctttcccatgtggactttacccttcgaaagggcgaaatccacgcactgatgggggagaatggtgcaggtaaatcaacactgattaaggtgctgaccggtgtacatgaatttgaaagtggaacaattcatatggctggaaacagtaatgccattattaaccactcgcctcaggaagcgcaggcaaatggtatcagtacagtatatcaggaggtaaacctttgtcccaacctgactgtagctgagaacctttttattggcagagaaccgagaaagatgggaatgattgattggaagcagatgaatgagcgctcaggaaaacttcttgagagcctggacattcatgtgccgccaacacagatgctggatgaatgttccattgcgattcagcagatgatcgcaattgcccgtgcagtggacatgaagtgccaggtactgattctcgatgaaccgacatcttcactggatgatgatgaagttgaaaagctgtttgtacttatgagaagacttcgtgacgaaggtgtaggtattatctttgttacgcatttccttgagcaggtatatgcagtctgcgacaggattacagttcttcgtaatggtgaacttgttggggaatatgagacgaaagatcttccgagagtaatgctggttgccaagatgatgggtaaggattttgatgatcttgcagatattaaaggcgatcataaagacaagagaatcacagatgcagaacctgtaatcgaggcaaaaggattatctcataagggaacgatcaaaccgtttgatattaccatcaataaaggtgaggttattggtcttaccggacttctgggttccggacgttctgaattggttcgtgcaatttatggggcggataaagctgatacaggaactttaaaagtaaagggaaaagaagtaaagatcaatactccgctggatgccatgaaacttggtatggcatatcttccagaagacagaaaggcagaaggtattattgcagatctttctgtaagagaaaatattattatagcgctccaggctaaacgcggtatgttccatccattaagcaagaaagaaatggaggatgctgctgataagtatattaaattactgcagattaagacagcaagtcgtgaaaccccgattaagagtctgtccggtggtaaccagcagaaggttatccttggaagatggcttctgactaatccggattatctgattctggatgagccgaccagaggtattgatatcggtactaagacagagattcagaaactggttcttgatcttgcggatcagggaatggcagttacatttatctcctcagaggttgaggaaatgctccgcacctgctcccgtatggcagttcttcgtgatggccagaaggtaggggagctggaagaggatgaactttcccagagcggagttatgaaagctattgccggaggtgacgataaataatgaataagagtaaattaaagaaaataacaagtgcacgtctgtttcttcctattgtgtgtctgattgcagtacttttgctgaatgtgatcagaacaccggatttctttaatgtatcaatccgaaacggtgtactctatggttacattgttgatgttattaaccgtgcttcagagttggttatccttgcaatcggtatgacactggtaacagcagcttccggtggacaggatatcagtgttggtgcgatcatggcagttgcagcggctgtctgctgccagattctttccggcggacaggtttctgtaaatgattaccagaatcctgtgattctggctgttatcgcagcacttcttgcatctgcattatgtggtgcatttaatggatttctggtttccaagctgaatattcagccaatggttgcaactctgatcctttacacagccggtcgtggtattgctcagctgatcacaaacggacagattacttatattcgtgtggattcttttaagatggctggtggatatattggaaaatgcccgattcctacacctattttctttgcgatcattacagttgttattgtgtacctgattttgaagaagactgctcttgggctttacattgaaagtgttggtatcaatggaaaggcagctcgtcttgtgggattaaattctacgatgattaaattccttacctatgttatctgtggtgtactggctggtattgccggtattgtggcatccagccgtatctactctgcagatgcaaacaacattggtcttaacctggaaatggatgccatccttgcagttgcgcttggcggaaacttccttggtggtggtaaattcagcctgatcggttccgtaatcggtgcctacactattcaggctctgaccacaacactctatgcgatgaacgtaaaagcagaccagcttcctgtttataaggcaatcgtagttgttatcatcgttacactgcagagtgatgtatttaagaaatatattgccaacttaaaggctaaaagaagtgtggcagcagaaggaggtcagaagtaatgaaagcaaatgtacagaaaaagaaaataacgggaaatggcttcctgcttctgatcacaatcgcattatttgtagtaatgtatgttgcaggtatgattgtttttgctgataaaggttttgcaaaacctcagatgtttctgaacctgtttgtatctaatgcgggtcttctggttattgcgtgtggtcttacaatcgttatgatcaccggtggtattgatatttccgtaggttctgttactgcacttgtatgtatggttcttgcagaccttatggagaacaaaggtgtgaacgcatatgcagcagttttagttgcactgcttattggtgttgcttttggtattgttcagggattcctggtagcttatctggatatccagccattcatcgttactctggcaggtatgttcttcggacgtggtctgacagctatcatcagtactgatatgatttctatcaagaatgagttattcctgaaatgggcaaattaccgtttctatatgccttttggttcaaccagtaagaagggtaaatttattccggcttatattccgccgacagttgtgattgctctgattgttgtaattctgatcgcggttcttctgaaatatcgtaagtttggacgtaagctttatgcgatcggcggtagccgtcagagtgcattaatgatgggtctgaatgttaagaaaactatttttaatgcttatgttctggatggttttcttgcaggccttggtggcttcctgttctgtttgaacagttgtgcaggtttcgttgagcaggcaaagggtcttgagatggatgcaatttcatcagcggttattggtggtacgcttctttcaggtggtgttggtactccgattggtactttgtttggtgtgttgattaagggtacgatttccagtttgattactactcagggtactttgtcaagctggtggacaagaattattctttctgcgttgctttgtttctttattgttattcagtctgttgtggcttctatgaagaagaaagcgaaataagtggttgtattatgaaacaagctgagacttttgggagtcttggcttgtttttttgtagagggacgcgcgaaacagcatctctctgtgggttcagttccgggggctaagtaactctaaggtggaggaaatccgctaaaagcatgaagaaaaacgcaaaactcgctccgcctccgacttcgctcagacaggttgctgtttttcttcataacgcggattttctccgcctaagagttactaagccccctccagattcacccacagagagatgctgtttcgcgctgggtactggcaacgatttagagcgaagcaagtaaatttctgataaactgtggagaagatattggggtatgggcaggttgcgaagaggatgatgttattaacttgaacgtgagtatcgatactttattattattgttcgctagtaatatcctgcgaagcgtgttattgagaacggagtgaacagtaatgctttatttgtttataactgtgaattatgatggtttgcttgccatggggggagttttattttatactttaagcaatgaatgatgttaaggttaaaggggattttgatcttgatattattgaaattatgtgagaaatgtggctttactaatggttggatatgtagtacaatcgtaacttattatgcgtttattttaggaggattatgatacgatgtggatcgcagatggatggaaagattatgaggttatcgatacttcctgtggggagaagctggagcgttggggggattatcttctggtgcggccggatccgcaggttatatgggatacgccgaaggtgaataagggctggaagcatatgaacgggcattatcacagaagtaagaagggcggcggtgaatgggagttttttgatctgcccgagcagtgggatattcattataagggacttacctttaatttgaaaccttttagttttaagcataccgggctttttccggagcaggcggtgaattgggactggtttggcaataagatccgcaatgcgggacgtccggtgaaggtgttgaatctttttgcatatacaggtggtgcgactctggcggcagcggctgcgggagcttctgttactcatgtggatgcttctaagggtatggttacctgggcaaaggagaatgcggttgcttccggtctgggagatgctccgatccgctggctggtggatgactgtgtgaagtttgttgagcgtgagattcgcagagggaatcattatgatgcgatcattatggatccgccttcttatggacgtggaccgaagggggaaatctggaagatagaggactgtattcatgatctgattaagctgtgtaccaaaatcctcagtgatgagcctctgtttttcctgatcaattcctatacaacaggtctggcacctgcagttcttacttatatgctttctactgagcttaagaagtttggcggacatgtggactctcaggaaatcgggcttccggtaagctctaacgggctggttctgccttgtggcgcttcaggaagatgggaagcgtaaattagtttccttttgtttgttattgacggaaatctgctttttagctgaatcaggtaaagctcttgctgaggttgcgaaaatgatttttcaaacacgcgctaagtagtagaggggaggaaacgtgattatgaaggaacttaatttaaaacatgaagccaagcgttacggctgtgcggttctggctgcaacgatcatggcgttgaatattaagacatttgttcgtgcaggcggtctttttccgggaggatttacaggacttactctgctgatccagaacatttttcagacatttatggggattgcagttccatatacgctgatcaatgtactactgaactctattcctgtatttattggtctgaagtttattggaaagaaatttaccataagttctgtctgtgtgatcgtgctttccggtctgcttacggatataattcccagtcagccgattacttatgacacattgttgatcagtatctttggtggtctgatcaatggcttctgcatcagtctatgtctgatcggtaataccagtacaggtggaacggattttattgcgatttatttttccgagaaaaatggcagggatatctggaattatatcctgtgtggaaatgcagtgatcctgacagtggcaggtttgctttttggatgggacagggcactttactctattatctttcagtttacctctactcaggtgattcagatgctgcatcagagatataagaagcatacgctgttcattatcacgaaggagccgtatcagatttatgaggagattttcaaacttaccaatcatacggcgacacgttttgaaggtaccggatgttacacagacgagaagaccagtatgatctattctgtagtctctacagaagaagcgaaatatctggtaaagaaggtacatgagatcgatccgaaggcttttgtaaatattatcaaaaccgattacataaacggaagattttaccagaaaacagattattaattacttgtattccctttctgtgagcgtataatacaggatataaggaatctgttcgttcatggagtttgtacttaaaattggatgaacagtaaccggcacacaaggagggtgatatatatgggtaatgcaacagaaagcacacttcctcacggcaatacctcaggctatgaccgcaaagcctgcaggacatgcgcctgttccacctgttatgagcaggagttctgcgacagatgcagttcctgtcagaatcagtcacggaaattaaacaggtgcaatgcttacgagggggcatataactattaacctcaacatatccctatctgctgcaaaataataaacagtggatggggatttctttataaaaaacagttattatattataagtataagcaatgtttttctatagcaagcctcttaatcaatatgcattatttacgagggttgctataagtttacagattcataagatgtatctgatataataattctgttacttactgatataaactttccgtaagttcttttgctgatgaactttgctatagaatttttttggggatggcagaatgttgaatggttacaaaagaacaattatttacaggagaagaaaaaatatgatcgtatatcactattgcagtttagaatcattgaattctattttgaaaaatcgttccctccgtctgacaaatatcctgaaatccaatgattccatggagatcagctggatctgcaggtattatgacgcagaatttaaaagagcttatgaaaatgcttcagatttattcagatcaaagatttcatcagagagattgatgggatatgtgaaactgtttacagatgaatttttcaatgaaaatcatgcagacttcagatattatgtaacctgtttttcgtatcagaatgatctgctcagtcagtggcggggatatgcggatgacggtcgcggagctgccatcggatttgacctggatgtattaaaagaagttgtaacagtttctccggagatttcaaagccgtcaattgtgtcattacataagatcagttattctgaagcagagcagagagaagttgtacatcagatagtgcatgaattggttgatgaaatcgagaagatattacagaaagaagaacaatgtcgggaaagcattgaggagaagcaggattatgaaatagaagtactggataaagtcatgaactgttttgagaaaaagtttttgaaattatttcaggaatctgtttacatgaaaaatccgtttttcagagaggaaagcgaaatccgattgtgcgagttttcgccgaaacagtttctgatgggaagagaagttgaactttctctcggtgcacgtttatataactattcctactatgtaaaagaaagtcagctgatatcatatgtggattttgatttttcagattgccttgaccagctgataaaggaactcgttatagggccaaagtgtctgatgtcagagagagacatggaatattatctgacaacgctcggtctgtcgaattgtcgggtaaagaaatcgcaggggacatatcggtaatatatttatagcaattcccttatatgggcatatcagacatcatggaaaggcagatgaaagacatgaaaagaaaattaccattcagaaaagtggcggtatttctgatactggcattatttctgacagcaggcatcagtatgcgtgcagttaccgtaaatgcagctacatatgtgaaacaggacagaacctccgtcagcatcacatcgaagaaaacgggatggcagaaaataaacggagattactatttttataattcaaaggggcgtctgatctgcggttcttttaagtataaaggttattattactacagtattgccaacggcaaacgtttcaccgggtggatgaagcgttccggtaataaatactattacaatcgcaaaaatggtgccatgttccgcaatcgctgggcaacaggtgataaatatacctattatttcaatgaatccggcgtggcaattgccaggcagtggcttactcaggatggaaaaaaatactatttcctcagcaattccaccatggcaaagggctggcagaagataggaaaatattattactatttcagcaagaaaacaggagtgatggcaaaaaatacctggataggtaaatattatgtaaacagcaaagggcagcgtgtaaaatcttcagatactaaaccgacaaatactaaaccaacagttactcaaagcggcaatacttacgaatacaaaagcagcactcttaatattaaacttaaacgcaaatcagtccatggaatttcctactgggtagcgcatataaagacatccaatgccaaacagttgaaatccgccctctccaacggaacttatggcggatcccgacagacaacttctgatgcagtatcctcaaatggaggcattatcggagtaaacggcagtgctttcgactatggtacaggaaaaccatccccccttggcatgtgcatcaaaaacgggattatctatggtgattacatgaccagttattcagtcatggcagtaaagaaagacggaaccatctatactccggcacagggacttatgggaaaaaatcttcttgcagccggtgtaaaagatacatataattttggtccgattcttattaaagatggcgaagcccagcttccatgggctgaaacagaaaaatattatccacgtacagcggtaggaatggtaaagcccaacgattatgtactccttgtaacagataccggcagctataatggtcttaatcactgggatatggtgaatattttcaaatcctacggctgtacttatgcttacaacctggatggaggcggttctgcaaccctgtactttaatggaaaagtaatgaataaacttatcggcaatactcagcgtccatgcgcagacttcctttatttcacccgataatccttttccagataagaatcccgtctgcttgcacatgctgccaaagcccagcacacaagaatcagcagcccaatccccatagccagcacagcaagcaggattacgataattgcgtggataaacatagacatggatgacctcctttcacagtcattcggttatgaactgagcagcgaagcagatgattttatccgcctgacttgtctcattcactgacttggataaaaatggatgttgtataagaagtaataaaaagatatcaggatgacctgacaagaacaattaagacagttaaaagatctgttaactgatttaaatatacgctgtcacactcaaaaaagcaagccgaaactttcgagggatttcgacttgctttttggctaattatttacgaggcttgttataagtatcagagaaagatgttacggcaatccagaatgaatttgggttacgttactgagaacagagggaacagtaacgattgttttggtaaaatattaacaattccataaaaacacttgacaaccctactttaccatactaaaatgtaaaaagcaaaaaaactgttgccgcaggaaaaacaaatgattgccctatacggaaaaagggacatccttccatggcagaacaaggaggaatattatgaaaaaatacagcgacatgagcaaagaagaactgcttacactcaaagaacagctggataaagaatacgcagatatcaaagcaaagggcttagctctcgatatgtcacgtggaaaaccgtcagcagaccagctcgatctctcaatgggattaatgaacgtattaagcagcgattcagacctcaagtgcgaaacaggagtagactgccgtaactacggtgttatcgacggaatcccggaagctaaacgcctccttggagaaatgtccgaggtagatccggatcacatcatcatctacggaaactcaagcttaaacgttatgtttgacagcattgcacgttctatgacacagggtgtaatgggaaataccccatggtgcaaacttgataaggtaaaattcctctgtcctgtaccgggatatgaccgccatttcaagatcacagaattcttcggaatcgaaatgatcaacgtgacaatgacaccacagggaccagacatggatatggtagagaagcttgtcagtgaagacgcatccatcaaaggaatctggtgtgtgccgaaatactccaacccacagggatatacttattcagcagaaacagtagagcgctttgcgcatctgaaaccggcagcacctgatttccgtatctactgggataacgcatacagcattcatcatctctatgatgacaatcaggactttcttgtagaaatccttgaagcatgtgcaaaagcaggaaatcctgatcttgtatataaatttacatcaacatcaaaagtcagcttcccgggttccggtattgcagcagttgcagcttccaaagcaaacctggaagatttccgcagctacatgcagatccagacaatcggacatgacaaattaaaccagttacgtcatgtaaaattcttcaaaaatatcgacggtcttcatgaacacatgagaaaacatgcggcaattctccgtccgaaatttgaaatggtccttaacacactggacagagaacttggcggtcttggaatcggcgagtggacaaaaccacatggtggatacttcatttcctttgattcaatggaaggatgtgcaaaagctattgttgccaaggcaaaagaagcaggtgttgtacttacaggagcaggcgcaacttatccatatggaaaagatccgaaagactccaatatccgtattgcaccaagcttcccgactcctgaggatcttggaaaagcagcagaagtgttcgtactctgtgttaaacttacaagtgtagagaaactactggctactgttcgctgataatatcccgcgaggtgttttttgtgagcgaagatcacagaaaacccgagacataccgcgcgaatttatgcaattagcataaattctgtgcatcgcgaagcgtgttactgtgaacggagtgaacagtaacactactggaaaacgcataaaagagaataatcgtatttactttctggataaataatgtgataataaaactgcccggcataatttcttgccgggcggttgctgtttataaaaaagaaaggagaggatgtcgtgagcagcagaaagaaaatcatgatcatcctgatcataatcttgctcctgctgactgccggagtatatggatatggtgtatactatttcacagagcatttcttaccgggatcaatggtaaacggattcaactgttcctatatgacagtatcccagtcagaagaattgcttacgcagaaggtgggagcatatgttcttactattgacaccagaaataacggacaggaaagtatcacagcaaaacaggcgggactttcctatgactcagatggaagtgttgataaactgatcagaaatcaggatcgttttacatggtttcttgcttttgatcagcacaggaattatgaggtgtcctcctccattaaatatgatgagcagaagacagaggctgccatttccgaactgaaatgtatgcaacaggagaatatgacagagccttcggatgctcatatagaagagaaagacgataagtttgtaattgttcctgagcaggagggaactgcactgaaaccagaaaaaacaagtcaggatattatagatgctcttgtcacaggacgaacgccggttgatctggaagcagatggatgctacaaagaaccgaaagtttatcagagtgatgaaactctgacgaagaattgtgaactgataaacaaacttacggatgtagtgataacctatgattttgacgatcgcacagagacagtagacagagatatgatcaaaaactggctcacaacagatgaaaacggtctttatacacttgacaaaaaacagatagaagcatatatcagtgaactggcggctaaatatgatacggttggaacagagagaacatttaatacatatgatggtcgtgagattactgtcagcggagggaattatggctggcagatcgatcagaaagcggagctgaaagaacttacagaactgataaaaaacggagaaacccaggtcagagaacctgtttattcccatgaaggtctggtcaggaaaacaaatgatatcggatatacgtatatagagattgacctgacggcccagagaatggtattctataaagatggaacgccgactgcggatgcgcagatcgtatccggaaatccattcgtgcccaactgtgcaactcctgtgggatgttatacaacaggtgaaatgaagagcggatgtacagtgaacggagaggactatccttctgctgtaaattactggatcccattcgatggaaatctggggatcagtgatgctccatggagaatggatttcggaggacagctttatgaatttgaaggcacacatggaagcatctgtgcaccatccgatcaggtgcagattattttcagcaatgttgagaagaacacaccgattgttatttatgaataaaggagaaaaatgatgaagattgtagtattagcggggggaacaagtacagaacgtactgtctccattacatcaggaacaggaatatgtaaggcattacgacagaaaggacatcaggcgattcttgtggatattttctgcggtattgagaatgtggaccgggagaatccgtttccgtcagaatatgatgtggacgcagcatcagaatatatgtcagcatttaatgacaggattgaacagatgaaaaaagagagaagaagcttctttggaccaaacgtgctgaaactctgcgaggcggctgacattgttttcctgggacttcatggtgcgaacggagaagatggaaaagtacaggcaacatttgacctgatgggaatcaaatatacaggaaccggatatttaagcagtgccctggcaatggataagggaatcaccaagcagatgttcctgatgaataatgtaccaacaccgcggggagtgtctatggtaaaagaagaaatgaccacagatctgaaagcacttggaatggaatttcctgtagttgtaaaaacctgctgtggcggttccagtgtaggtgtttatattgtgaatgatcaggccgaatatgagcaggctctcaaagacgcttattcttatgaaaatgaagttgtggtcgaagaatatataaaaggacgtgaattttcagtagcggttgtggacggaaaagcttatccgattatcgaaattgctccgcttcagggattctatgattataagaataaatatcaggccggctctacgattgagacctgtcctgccgaaatttcaccggaactcacagagaaaatgcagcattatgcggaagcaggagccaaagctctgtttatggaaggatactgccgtcttgatttcatgatgaaggagaatggagatatgtattgtctggaagcaaatactcttcccggaatgacaccaaccagtctgattccgcaggaggcaaaagttctgggaatcgactatccgactttatgtgagaaactgattgaagtttccatgaaaaaatatccggcgcaggatttcacactatagagcgtgtctgcagtaatttatagaattgttatagatacattattaagagaattgctataacaggaaagaagatataaaaaatattatgaaaaacttaactcttgaaaatatcgcccgcgtatgcggcggtacttattatggtccggctgataaattacaggaagaagtaatgtctgttatcacagacagcagaaaagcagaagaaggatgtctgtttgtacctattgtgggggaacgtgtagatgcccataaatttatcccacaggtaatgaaagcaggggcactggcaaccttgtcggaacgggtgcttgataacgctgattttccttatatcgcagtagaatcttctcttcaggcagtgaaagatattgcagagttttatttaaagcagcttcagatcccggttgtgggaattacaggaagtgttggtaagacaagtacaaaagaagtgattgcatctgttctgaaccagaaataccatactctgaaaacacagggcaactttaacaatgaacttggtctgcctctcacagttttccgtctgcgtgatggagatgaaattgcagttctggaaatgggaatcagtgatttcggtgagatgaccagacttgcgcagattgcaagaccggacacctgcgtgatcacgaatatcggtacctgccatctggagaatctgggagacagaaatggtgttctgaaagcaaagacagagatttttaaattcctcagaccagagggacatattgtattaaatggcgatgatgacaagcttatcacagtaaaagaatatgaaaagataaaacctgtatttttcggaatgagtaatgaatgtcaggtttacggcgataagattgtaagcagaggtttaaagggaatgacctgcaccattcatctgggggatactgcatttacagttgatatcccgatgccggggcgccatatggtatataatgcgctggcagcagctgcagttggaaatatttacggacttacaactgagcagatcaaagccggaatcgagagcctggagccgatcagcggtcgtttcagaatgatcgaaacagataaatttctgatcgtagatgactgctataatgcaaatcccatgtccatgaaagcctctctggatgttctgcaggatggtgcagggcgcagaatagcagtccttggcgatatgggtgaacttggagagaatgaagttcagcttcatgaggaggtaggagagcatgccggaaaatgtgatattgatgttcttatctgtacaggtaaactgtgcagaaatatggcagagagagcacagcggacaaatccggacctgaaagtaatctatgagccggacagagaaagtctgctggagcatctgaaaggttatgtacaggatggtgacactattcttgtgaaagcttcccattttatgaagtttgaagaggtagttacgaaactggaaaatatgtaaacacttttgtctttttatgagagaatttgatgagcgattttagttccatgataccggaaacagcagtataataatcctgtcagtttatgagcaggcagcgaagcagatagtcttatctgttcaagtgaggaggatgttatgctagagaaagttatggaactgcatttcctgctgtatgccatgatgttaatgggcggactgggagcactggggatgctgaccacacatcttacttaccgaagaatgatcagaaaaaatacagaggttaaatcaaatctcaaagagaaatggacaaatctttggaaaacaagagacaggctgttaaaccgtatgaaccggtttgtctggtatccgtcacttttctgtatcgcttttcttggactggctttttttctgtattccaaagatgcacgatgggacggaatgccgctggcatatctttatgtggctgcgatcattccgacagcattgcttttgctgagacaggcgctggattttacatacagagaagaacttctgatgaattctttttctgattatgtggaacatgcccgcacatgggtagaagaagttccggtgccggagaaggctgacgaagctgtaaaagaggaaatcgttgaacatattgcggacagtatccgccagactgcagcagcaggaagccatttcagcggaatgcttacacccgaggaagatgagattatgagagaaatcataagagaatttatgaaataaagacatgaaaattcactgcaaatgagatacacaggatcagaaataatatggcaatgtaaagtttctgatcctgtacatatcttaagacagaataatttattattcgtcatcctcttcaattacctggatctccagataatcaaaatcaatctgctctataaaattatcctgataaaatctggcttttccatgtttcttaaaatgtctgactgtagattccagccagattgggtttcccagatccatttcataacagatactttccagaccacgaaaaatcttgtgggtccgcgtatcttcggagtcatcgcagattacagtatctttcagtaaatgattatctttccataattttccccataaacggaacatatcggtaatacctccctgtcagaactgccacaggcggcagaaatctcattttctaagtgattcccagtatagcggatttttgcgggaaagtaaagaaagtgaaaagcaacagcaaaatacttatagtcttaggcttgattattccggtggaatattctataataaaacctaaatttccataaattagcgtgtcaaagtgccggttcaggagaaaatcagttttcatctggaaatttgaagactggtgtggataaggtgagttccataactgcatttgtgatatgcaaaaaaacagaatggaggagacattatgaaattatacgataccggtgtgtatttgctgaatggtcagaagattgttccggagaatcaggcagattttcctgtttccaaagaggaagctgcaaagagtacaattgcctattcaattctgaaagcacacaatacttccggaaatatggagaaacttcagattaaatttgataaactgacttctcatgatatcacttttgtcggaattatccagactgcgcgtgcctcaggccttgaaaaatttccggtgccatatgtactgacaaactgccataattcactctgtgcagtaggcggaactattaatgaagatgatcatatgtttggacttacctgtgccaagaaatatggcggcgtatatgtaccgccccatcaggcggttatccatcagtttgcaagagaaatgcttgcagcaggcggtaaaatgatcctcggttcagacagccatacacgatatggcgcactgggaaccatggcaatgggtgagggcggaccggagcttgtaaagcagcttctttcccagacttatgatatcaatatgccaggcgtcgttgccatttatcttaccggttctcctcgtccgggcgtaggtcctcaggacgttgcgcttgcgattatcggcaaggtttttgcaaacggatatgtgaagaataaagttatggaatttgtaggacctggtgttgcaaatttaagtgctgatttccgaattggtgtagatgtaatgacaacagagaccacctgcctttcctctatctggcagacagatgagaagattcaggaattctatgagatccatggcagaagtgaagattacaaagaactgaaaccaggtgaaacagcatactatgatggctgtgtagagattgatctgagtgagatcagaccaatgatcgctatgccattccatccaagcaatacatatacaattgatgaactgaaagcaaatctggatgatattctggcagatgttgagaaaaaagcacagatcagccttgatggaaaagttccatatacattaagagacaaagtaattgatggtaaactttatgtagaacagggaatcatcgcaggatgtgcaggtggtggatttgaaaatatctgtgcagcagctgatatccttaaaggcaagagcattggtgcagatgccttcacattgagtgtatatccggcaagtactccgatttatatggaactggctaagaatggcgttctggcaggacttcttgaaacgggagctgttgtgaagactgctttttgcggaccttgctttggtgcaggggatactcctgcaaataatgcattcagtatccgtcatacgaccagaaacttcccgaaccgcgaaggttccaaaatccagaatggccagatttcttctgttgcacttatggacgcacgttctattgcggcaactgcagcaaacaaaggtttcctgacttcagcagaggattatacgggtggttatacaggacagaaatatttctttgataagacaatttatgacaatcgtgtatttgacagcaagggtatagctgatccgggtgtagagatccagtttggtccgaatattaaggactggccggagatggctgcatttccggagaatctgatcgtgaaggttgtttctgagatccatgatccggttactacaacagatgaactgatcccgtccggtgagacatcttcttatcgttccaacccacttggactggctgagtttacactttccagaaaagatcctgcttatgtaggacgtgcgaaagaagttcagaaagctcagaaggctattcaggaaggaaaatgtccggttgaggcattaccggagatgaaacctgtaatggatgtgatcaaaaaggattatccgaatgtaagcaaggaaaatcttggtgtgggaagtacgatctttgcagtgaaaccaggtgatggttctgcgcgtgagcaggctgcttcctgtcagaaagtgcttggcggatgggcaaatatcgccaatgagtatgcgacaaagaggtaccgttccaatctgatcaactggggtatgcttccattcctgattaaagaaggggagcttccgtttgcaaacggagattatctgttcttcccacagattcgtaaggcagtggaagaaaaggatgatgtgatccggggatatgttgtcggtgctgagggactgaaagagtttgaagtggctcttggggagcttacggatgatgagcgtgagattatccttaagggatgcctgattaattataatcgaaaataggaagtgatgaagatgcagttatcctctctttgggttgggagtagctgcatctttattatttatgaaattatgagaattacgggaactgctttgcagcggagcgattcgtggatataatagagccccgggcagcaacgtactgcatcgaagaaaacgaaatagtctgaaaattatcaaataaataaaaatattataaaattagtgcaaataagacaaagataaatagaaaatattgaaataaaatgcaaaaatgtattgacaaataataacaagagtgttattataacaccatcaaaagaaacaaggaaacgaattaaacaatcaaagaaattcattcaattcatagcatatataaatgttccaatgaaaaggatgaaaataaaagaaaggttcgggtgattccattgggaaagaatttataacttcatcaatataagagtgacgggtatcgcatttcctgcaagaaagacctgatacggagattataaaaaagtattttccttatataatataagagcatacgcacagtctgattaataaggaaggaatgtatcaaaggtattatagaagcgataacttatattgaatatctgttgcagacctgatacagggattttggtaaatgtgtaaagaaatatttaccggaagagcataacccttatctcagtagttagcctgaaagcagaggttcaggtaacagataaactgaaggtaagaacgatgttttgagaggcatatagaagtttaagtatatggtttgaaatcctgcatcagaagaatatccggtatataaaattacaggatattgagagaaatattaaggtactttttcagtgatactttacataattcagaacatctgccattaatgttcgataaatatgaaaagcacataaggaaattaaacagttgtgaatttaagaagttaggtttatgattgcttagcacgaaaaataatgaaaaagtgtatccgatatttcataaatgaaaacaaattataatacgtgaaattataatttaaaatctataaaactttctaagtaagttccgatgaactgaataactgatatcataaaagcataaaagcaggaatgaatcagattataaacagtacatatggattatgagcaggaaacagaataggaattttaaataaacatagaaaaatttaatagtgaacttataaagtagtttgtaaataacatattattttattatagaaagaatactaagaggaaaataaattgaataacgaagaacattgaagcggtcatcatttttgaaatcaggaaaagtaaaaagtgatgaccgttttcaaattgtattcatatatatattcgtttattgcgtgaaatggaattttaggatatactctccatgaaaaggagagtttttttatgtggataaaagatatcagagattatattttatatgaagataaagatattctggtctgtcacaaaccggcagggcttgcagttcagaatgcgcgggttggcagtatggatatggagagcctcttgaagaattatattgctcagaaggtgccgggtaagatgccgtatctgggtattatccatcgtctggatcagccggtggagggggttcttgtatttgccctgaatccgaaggcagcagcagatctcagcagacagatgacagcgggaaaaataaagaagacttatcttgcagttacagaaggaacagtgaaagtgaagagtgcaaaactggtggactggctgaagaaggatggcaggaccaacagctctgcagtggttgagggaggaacttccggagcaaaaaaggcgatcttgtcttatgaagttctggaaacctggaaaaataaggaagatgcacaggattgtggcgaaagaaatctgattcggattgatctggatacaggcaggcatcatcagattcgtgtgcagatggcgcatgccggaatgcctttggttggtgacagaaagtataatcccggtcagaatagtcaggaaccgctggctctctgttctgcaaaactgggatttcagcatccggtgacaaagaaacagttggagtttcaggtgcagcctgcaggtatggcattcaaaagacattgacatagcgcaatttttgatgtataaaagtgaaaaatgtgtaaaatctctggacgaatttcgtaaagtgtgtataatgtagaaagtaatatgcagttataaggtttatagcaattctcgtaaataatgcatttaagaggatcgctacaggtaattgttcgatgttaattattctgtgagagtactgggcagatatcgattttttagttgacagaaattatacattattttatgaaattgctgtaatgtgcagtatagcactgaaaggaagaggaaattaaaatgaaaagagcggcggcagcagcgataagtttaatgacaggactggcaatgctgacaggatgcagcagagcggaggtggaagagacaatccagccgttggtggcagacgctatcgaagaatccgattcagaggcagaagcggtgaaggaagaggatgagagtccgctgattccggagattgatacagatataaaaatccatgccggttcaaggatcgcagtggtaagcaaatgtgtcaagggcgaatactggaagatggttaagaaaggcatggaagatgcggtaaaggaaattaataaagcatatggttataaaaaagatgaccagattaccatgacttttgaaggccctgataatgaagaggacgtagaaactcagattaatacaatagatgctgttatcgcagagaatccggatgttctttgtatttcggcaagtgacatggattcctgtgaggcacagcttgaagctgcaaaggaaaatggaattccggttatagcatttgattctaatgtagccgagaaaaaactggtgaaggcatatcggggaaccgataatgtgcaggtaggaaagatggctgcttatcagcttggcagtgcactcggaaagatgggaaaggttgcggttttttccgcacagcagaagacaaagagtgttcaggatcgtgtagaaggatttatgaataatatcgggaagtacggagacattgaagttgtggaaaccatttattctgatcaggtagatgatatggaggcttccatgaaggaagttctggaaaaatatcccacactggatggtgtattctgtaccaatgcagatattacggagatgtatctgaatctggagaagagtgatgagcatgatgcaccggctctggtaggggttgatgcaactactaagcagcaggaagcaatccgtaatggagaagagattggctgtgtttcccagcagccttatgctatgggataccagacgatctgggcagcagttgaaacaacggcaccgaagaaatctgttgtgatcgagaaaaatgtactgagcaatccggcatggatcgatgcagactgtctggatgatccggactacagtggatatttatatacagaataagaattaaagataaacgctccgggaggatgtacagggtctcaaatgcattaattaagaggattttctataagaggaatgtgtctgctgggacagaccggtaatacagaacttatatataaagcagaattatatacgaaagaagaagcatgaaaacagtgatgagttgttttcgtgcttttttgtgttatagaatattactccgtaatgttctatgacacaaaaaagctctccgggcaggctccttatttatatctcttcttctttgaaataaaaatataaacaaatcagaagctttgactgtataaaaagatttatattgatgatataatcacatacacgatataaaaataacaaaaaaatattggatggatgaaaaatatttgataaaattatctaatgagattgtaattttaaaggatatatggtaaaatttgactataaattcttgaaaatatatacaaaaattaagcaaaaaggagaagaggatgaaacaatggtcagagatcatcagaaatgtcaccatgttgtcgcagcttggactgtctctcataacccctgtcctgatatgtctggcagtatgctggctgattgtttctaagaccggagctggcggatgggtatatatccccggttttttctttggtcttggaggttccgggacagtggcatataaattttatctttctattaacagacagcagaagaaagagaacaaaaagaagaaaaataaagtatcgtttaacagacacctgtaatgatacagaaacgaaagggagatttatatgagtattatggataatgttcagcctgccgtaaagaaggaaaccgggaaggtagccgccatcaccggaatcgggctgattttgatgtggatcgtgtttggagtgctgcatgctttcatgccacagaaggtaccgtttgattatacggtgtttcttggaggggcagtgggaggatgtgtggcagtccttaatttcttttttatgggacttgcagtgcagaaagcagctgcagcaacagatgaggacacagcgagaatgaggatcaaagcaagttactcccagagaatgctgatccagatgttgtgggtgatcttggcaatcgtggcaccctgttttcattttgtggcaggaatcgttcctcttttatttcccggaacaggaattaaaattgcaggaatttttcatactaacaaataggtatttctatatcaaaccggaacagtaccgggagagacaggaggtgaataaagagtatggaattggatatcagcggggcaaggatattctttacattacccattgatgtgcctgttctcggaccattaaggatcagtgagacaatggtggtaagctggattgttatgatactcataacaggtttgtgtatctggctgacacatgatctgaaagaggagaacatttccaaacgtcaggctgtggcagagctcattgtagagaaggccaacagctttgtaatcggaaatatgggggagaaattcagatacctgataccatttgttgcagcactttttgcaaccagtgtggtttccaacctgatcagtctgatcggacttcgaagccctacagcagacctttctactgaggctgcctgggcagttgtggttttcattatgatcacagcacagaagataaagaccagcggatttggcggttatctgaaaggatttacaactccgatcgcagttatgacaccgtttaatattctttccgagctggctacacctgtcagtatggcgtgtcgtcatttcggaaatatcctttccggtgtggtaatcaatggcctgatctatggggcactggcagtcgcaagttccgcgcttctgggcctgatcccgggtgcactgggagatgtactgtcaaagataccgattcttgatgtcggtgtacctgcgataacgtcggtctattttgactggttctcaggagttatgcaggcgtttatcttctgtatgctgactgtaatgtatattgcaaatgcagcagaagagtagcagaaacatgatttgccggagcaaaacggcaacggtggtaaccgcaaagaatgctgaaatacagcagaaaaattaataccgcagcaaaggggaaaagctgcagattattatttaacaggagggttttaatatggattttcagttattggcaaaaggtatcgcattagcaggatgtgcaattggagcaggatgtgcgctgatcgcaggtatcggacctggtattggtgaaggtaacgcagtagcaaaggcattggaagcaatcggacgccagcctgagtgcaagggtgatgttacttctaccatgcttcttggatgtgccatcgcagagacaacaggtatctacggtttcgtaaccggtctgttgcttatcttcgttgcacctggtatgttcatgaacttcctgagctgataaaaacagctgagatgtcgaatatcacagattaagcggcatctgatatggaacctgtggataattccggcaacagccggagaatgatccgcataaatacagacaggaggttacaaacatgcaggtacaggaattagttggaattgtgccgtggaattttatagcgacgatttgcaacctttttattcaggtatatctgatcaaacgtttcctcttcaagcccatcaatgagatgctggaaaagcgcaaagcgaaagcggatgcccagatccaggatgcagtgaaggcaaaggaagaagctcaggcaatgaaggcagaatatgaaaagaatatgcaggaagccaagaatagggcaaatgacattgtgatgacagctcagaaaacagccgctatccagagtgaagagatgcttaaggaggcttccagtcaggtaactgccatgaaagagaaggcagagaaagacattgcccaggagaaacgtaaggcagtcaacgagatcaagggagaaatcggcggtatggctgttgagattgccggaaaagtgatcgagcgcgaaattagtgaagaggatcatgcaaaactgattgatgagtttattgagaatgtaggtgaggcatcatgacaaaaactgccagagtttacggcggaagtctgtatgaccttgccgctgaagaaaagctcgatggacagatcatggagcagatgatcgcagtcagacagattttcagggaaaatccgggatatttgaaattgctgggagaaccggcgattcctgaagacgagagacttaagatgattgaagaggctttcggagggcaggcagagagatatctggtgaatttcctgaaattattgtgtgaacgcaagattctgagagagtttgccggatgctgcgaagagtttatcagacgctacaacagtgcacatggaattgcagaagccgtggttaccagtgcagtgaagctcagtgatactcagatggaagctctgaaagcgaagcttgagaagctaagtggaaagaaagtgtatctggttcagaaaacagatgcatccgttcttggcggacttcgcgtggaactggagggcgtacagcttgacggtacagtacagagccgtatttccggtatttcgaagaaactgaatgaattggtagtataaggaactggattccggatttgagaatcgtactgtatgggtatttgacatatggatatgaaaaatctttaaatttctgaattcagacaacgcaaaataatagaatataaaaggatggaatggaaacatgcaattaaaacctgaggaaatatccaaggtcatccgaagccagataaaatattacgaaaatgccattcaacagaacgagacaggtacgatccttatggttggtgacggtattgccagagctagcggactggtaaactgtatgtcaggagagcttctggaatttgaggacggaagctttggtatggcacagaacctggaggagaacagtgtctccatcgtaatctttggttcagatgagaacattggtgagggtcagaccgtaaagcgtacaggcaaggtcgtgtctgtacctgtaggcgacgccatggttggacgtgttgtaaatgcactgggacagccaattgacggagcaggcccgattgatacaaaagaattccggccaatcgagagcaaggcaccaggaatctgtgagagaagatctgtatatcagcctcttcagaccggtatcaaagccatcgactctatgatccctatcggacgtggacagcgagaactgatcattggtgaccgtcagaccggtaaaactacaattgctacagataccattattaaccagaagggaaaagatgtgatctgtatctatgtagccattggacagaagcgttccacagtagctacattagtagagaacctgaccagaaacggcgcaatggattatactatcgttgtggcagctacagcatctgagtcaagcccgctgcagtatatcgcaccgtattccggatgtgcaatgggtgaatactttatgaataagggaaaagatgtgctgatcatctatgatgatttaagtaagcatgcagttgcataccgtgcactttccctgctgatccgtcgtccgcctggacgtgaggcatatccgggtgatgttttctatctgcattccagacttctggaacgtgcagcgaagctggacgatgaacatggcggcggttccatgacagcactgccgatcatcgagacacaggcaggtgacgtatctgcctatattcctactaacgttatttctattacagacggacagatattcctggagacagagttattccattcaggaatcatgcctgctgtaaacccgggtatctccgtatcacgagttggtggtgatgcgcagatcaaggcaatgaagaaggtagcaggaacactgaaactgatttattcccagtaccgtgagctgcagagcttcgcacagtttggttctgatctggatgctgatacaaaggcgcgtctggaacagggagcacgtattgtggaagttctgaaacagaaccagaatgcaccggttcctgtagagaaacaggttgcgatcctttatgcggttacaaagggtgttcttgaatcagtaaaagttgaagacgtaaatgtatatgaatcaggattatatacctatctggatacagatgcagcaggcgtagaggttatgcaggaaatccgctcaacaggcaagctggagcaggaaacagagcagaagcttcgtagcgtactggatgcgtatacagagaacttcctgaatacaagacctgagaaataaagtgattaggagggtatcgtatggcttcgaatatgaaagcggtaaagctgcgtatcaagagtgtacagagtaccatgcagattaccaaggccatggagcttgtagcgtcctccaaactgcgtaaggcaaaggaacgtgcagaggtatgccgtccgtactttacagaacttcatgagacattgaaagagattgcaagggagaatacagatttctcatccgtttatgcgaaagagtcttccaacaataaaacctgctatgtagtgatcgcaggtgacagaggactggcaggcggatataacaccaatctttttaaatgtctggaggcttctgctgaaggtaaggactacatggtcctgccggttggaaagaaagcagtagaatatttccgccagagagagattgaagctctgacagaacagtttgcagaggcaggaagtatttctgtagcggattgttttgagatggcaaatatgctctgtacagaatttcgcaaaggaacctttggccatattgaattatgttatactgtctttaattctatgctttcccagcagccggaggtattttccatgcttcctatgactgatatcagagaggaaagcggaggtaagatagagacgaagaatctgatcctctatgaaccggacggagagacagtatttgatgccattgttccggaatatctggcaggcctggtttatggcggtatctgcgaaagtactgcaagtgaactggcagccagacgtatggctatggatgcagccacaagtaatgcggaagagatgatcgatcaactcaatctgtattacaacagggcacgtcaggccagcatcacgcaggagatcacggagattgttgcaggtgcagaaggtctttaatataatttccaacagataggagattactaacatgagtgaaaaacacattggcgaggtagtgcaggttatcggtccggtactggatatccgctttgcgcacgatgaactgcctcctcttctcaatgccatagagattgataatgatggcgcaaagctggttgccgaggttgcacagcaggttggtgatgatgtggtaagatgtattgccatgaattctactgatggtctggtgcgcggtgccaaagctctggatacaggcggtcctatttctgttcctgtaggtgaagaatgtctgggacgagtatttaaccttctgggtgatccggtagataatcttccggcaccggaggcaaaggaacgctggtctatccatcgtcaggctccttcttatgaagaacagatgcctgcaacagagatcctggagacaggtatcaaggtcgttgacctgatttgcccttatgcaaagggtggtaagatcggtcttttcggtggtgcaggtgtaggaaaaacagttcttatcatggagctgatccacaacgtagcaactgcacacggcggactttccgtatttacaggtgtaggagagcgtacacgtgagggaaatgacctttacaatgaaatgaaagaaagtggagttatcgacaagactgctctggtttacggtcagatgaacgagccgcccggagcacgtatgagagttggactttccggacttaccatggcggaatacttccgtgatgagaagaatcaggatgtgctcctctttattgacaatattttccgttttacacaggcaggttccgaggtgtctgctcttctgggacgtatgccttcagctgtaggttatcagcctacactggcaactgaaatgggtaacctgcaggaacgaattacttctacaagaaagggctccatcacatctgtacaggctgtatatgtgcctgccgatgacctgactgacccggctcctgcaactacattctcacatctggatgcaacaactgtactttcccgtgagatttccagccagggtatttatccggctgttgatcctctggattccacaagccgtatcctttctcctgaaatcgtaggaacagagcattatgagattgccagatcagtacagagagttcttcagcgttacaaagagcttcaggacattattgccatcatgggtatggatgagttgtcagaggaagacaaacgtactgtaagccgtgcccgtaaggttcagagattcctgtcacagagcttctctgtagcagaacagtttacaggtatgcctggcaaatatgttccgctgaaggagacgctgagaggattcaggatgatccttaacggtgagtgtgatgacattcctgagagttatttcctgtttgtgggaaccatcgatgaagtgtttgaaaaagccaaaaatcagtaaagggggaaatgtcctatgagtactttcccgttgagaatcggaacaccggacggattactctttgaaggcaatgtggagcgtgtgatctgcagaactgtcagcggtgatctggccattcttgccagacactgtaattactgtactgccctgggaatgggcgaagccagtgtggtaatggaagacggcagcagacggaccgcagcctgtattggcggaatgctttctgttatgaacggaaagtgccgtgtccttgcaactacttgggagtggaaagaggatattgatgagcagcgcgcacaggaagctaagaaaagagctgaggagatgattgccaaaggtggtttgagtgatcatgattataagattgtggaggctaaactgcagagggcgttggtgcgtttgagtgtgaagagctgagaaaataagagttattaaaagactgacaggaaatccgggaggggagactgtcggtcttttttgtttgtgatatggttttttgggggatatttttggggatatggtgggaagaatctgagggagggatttgaaggagggacgcatagaaaaataatttatttcatgtgcggtttcggacattaagatattctaagctgctcaaaatctgctaaaggcatgagaaaaatgccacaaactcgcttcgctcagacagtgtgtcatttttctcataacgcagattttgaccagctaagaatatctaaatatcctgcaaatgcacatgaaataaattatttttctatgctggtggttggctcttttaaatacactttaagcgaatcaggtaagtcccctgcggggaaaccaaaaggaaaaaatgatgaataaagccgaatggcagtgtattaaaattaggtggatgtaattgaagaaaaaatatgatatcatgtgagtaacaaatcggtatttaacgaggaggtaatgattatgagtagaaatataaaaggtggttttttaacattaagtggtgttgttggtattgtaggaatgataatagcggcaatgcaaaatccggcaactgcatgggtaacgccacctggaagaatgattgtaagtattttagaaaatggattattgattcctacggttttattccttgttctttttatttatggattgtatattctcctaacggagaaaaacgattgagcaataccggtttgtcgaattaagaaaaccggtatttgtggaggaggaattctgtaatgagattttttgaaaatacccgtaagccacaaggcttcggcggaaaattgatgacgaagatgatgaacagcggtcacgccaaattatcgcaatggggattctcaaatatctccgcgaagtctgatgctgaagttctggacgtcggctgtggcggcggagcaaatattgcggtttggcttgatagatgtagaaatggccacgtgacaggaatggattattctgaggttagtgtggcagaatctcaaaaattgaacgccctcgccattaaacaagggaaatgtaatgtagttcaaggagatgtatctgctatacccttttctgacgcgacttttgattatgtttctgccttcgaaacagtttacttttggccaggattagtaaaatgcttttccgaggtcaaccgtgtgctgaaaagcgaaggcatattcctgatttgtaacgagagtgacggaacgaatgccgcagatgaaaaatggacaaagatgatcaatggtatgaagatttacacatctaaacaacttgttgccgctttgaaagaagcgggttttacagagatcaaaacgtattcaaatgcaaaaaatcattggataagtattgttgcaacgaaatagccaaattctagtttgacggagtaatagatatgaaaatccgagaagtgaatgagaataaaaagcaatttatagcattattgttattagctgatgagcaggaaaatatgattgatcactatcttgaaaaaggtactatgtatgtacttgaagatggtaatgtaaaagctgaatgtgtcgttactgatgaagataatggaatacttgaaattaaaaatattgcagttgatcctcagaatcaaggacagggctatgggaaagcattgattgacttccttgtaagtaaatatgcagatgaatattctattttgcaggttggaacaggtgacagcccgttgaccgtaccgttttatgaaaaatgcggatttgtccgatctcacaatattccgaatttttttacggacaattatgaccacccaatttatgagtgtggtgtacagttaatagatatggtatatttgcaaagatgtttataacttctaatttggaaggggggactgctatgctgagaaagttgaattgttttttaaacatcgttattggttcattcataggagttttcattgggttcggaatttataagttctggcactttaaaacctatccaaatttatatgccatgcagtctgcaccgtggtacacagagttgctgttggatggtgccttggtggcagttttggtggtcgtatgtattatcctaaagctgattatttggaggaagttaaagccataacttcttatatgaaaaattgagaaatcgtaaaatttaagaaaaagaaatgcacagttcttagcttatcgggagctgtgcatttttgtaaataaatacttttaattagccgattacggcatcctctgctgtaaaatgttctagagaattttcttttacctgaatgcagatataagtaattccggaaatatcggacgcaaaaaactgacgctttgcagcaggtgcgatttttagccagtctccagttgaaaggctgatttcttttccatcaattatggctttgccgttacctgaaagaattccatagatttcttcattttctttatgagaatgaacaaatgggacatttgctcctgcaggtagttcgtttaaactgatttctgcacctgttaaagacaacttttcatgcagctcaattcggttttcctttccaatagttgtttttgtgtaatttgccatgataaaacctccatagttaatttgtagtttctggtttcttggtattagtatagtgtgagatacatacaaaaacaagtacgcacctttttgtaactgtacactcaaaaatgaatgtgttacaatagactcggaggtgagaattatgcgagcaaaagaagaattaccggaatgcccagttgcaacagcagtatctcttatcggaggaaaatggaaactgctgattttgcgtaacttgaaagagcgtccatggagattcaatgagctacaacgaagtatagatggtatttcacaaaaggttttgacagatagtttaagacaaatgatgagtgatgggctggcatatcgccacgattaccatgagcagccaccgagagttgaatacggcttaactgaactcggaacaaaaatgcttccaattgttaattcacttgctgactttggtaactactataaatcaattattgaacagaattaggtatgttagtatttgaaaagctcgaacaattccagctttttgaaactgagaaatcggaatttaacgcttaactaggaggaataaacatggcaaagaaagaagaaagatttgaagttatatttagagatggaagttcgcttaaagatgaagggattcgacaaattcttgtagataaggagactggagttaattatctttgttggaaatctggatacggggctggtattacacctcttctggattctgaaggaacagtcgtaattacaaagtaaaattcagcgttttcaagggtttgcagagaatttaataacaaaatataacagttattaaatcgcttaaaacaggtgaaatctcaatcggtatttgacataggagtgcgattatatgaaaaagaaaattattctatcaatagcatttattatcagtttattaccaatgttccttaatcaatatggtgagctaaaaggcgtacaggaaatcacaggtttaataaatttgctcaatcccattggaatggtgtctgttattttgtttgctgtgggtgtatggtttcccttcaaggaacaggttgttggcaaaagtttaggtgcattaggcacaattggtattgttgtttctgagatatataagttcttcacatggcacgtaatgaatataacgggcgaagtaagtatccataaaagcattagatttgcattcccagagttttatattggtttgataatttctattttaatggtggttacatattttgttatcgacaagaaagtaagtgctacatctgtttcaaattaacagacagattccagtttgtagaattcaaaaatttaatatgaaatgtgagatagagcgtatggaaattaactatacgttctattctttttgccttttttgaaaaaagtgattaaaaaactattgacattttgttactggaggagcgcaaagattccttctgaataactgctccgcagtttattagaaggagcttgcactcctcctgatacaagcaagttcccacccactgcttattgcttttcgcaattaaagcaggggacttacttgacttcggctaaaaagatggaatatagtatattgtcgcacattgacactttaccatgataaggttaaaataaagataaattatgcactgcaagagaaattggacagttgcaatattattctgaatttcggtggtttgccgggattatttgaacaggagcgaatgtgttatgatagcagaaaaaatgaaaccttatgtaaaaaataattcagccatccgtatgatgtttgaggagggaaatcgtctcagagccatttacggtgcggataaagtttatgattttagtcttgggaatccgagcgttccggcaccggagtgtgtgaagaaggctattattgatctggtgaacgaagtggagccgacagtgcttcatggttatatgagtaatgcgggatttgaggatgtgcgccagacgatcgcagaatctttgaaccgccgctttggaactaaatttgcggcaaagaatctgattatgacagttggggcagccagtggtctgaatgtgattttcaagacaatcctgaatccagaggaagaagtgattgtttttgcaccatactttttggaatacggtgcatatgtgcgtaattttgatggcaggcttgtggaaatctctccggatactaccacattccagccgaatcttgaggagtttgagcagaagattacggcaaagacaagggcagtgatcgtaaatacacctcacaacccgacaggtgttgtatattccgaagaaaccattaagaagctggcagcaattcttgagaaaaagcagcaggaattcggcagtgtgatttatctgatctctgatgagccatatagagagctggcttatgacggtgtagaggttccgtatttgacaaaatattatgacaataccattgttggctattcttacagtaaatctctgtcccttccgggagagcgtatcggttatctggtaattccggatgaggcagatggcagcgaagaacttattactgcagcggctattgctaaccgtactatcggatgtgtcaacgcaccatccctgatgcagaaggtgattgccaaatgtgtagatgcagaagtggatgtagctgcatatgacaagaaccgtctggcgttatacaatggactgaaagaatgcggattcgagtgcatcaaaccccagggtgcattctacctctttgtgaaatcaccggtagcagatgaaaaagcgttctgcgaagctggaaagaaatataatattctcatggttccgggaagttcctttgcctgcccgggttatgtgagactggcttattgtgtatcttatgatactatcattaattccctgccggagtttaagaaactggcagaagagtttggactgtgaaaacggcggggattgacattgggacaacaacgataagcggtgttgttctggaaaaagaggaaaacggactggcaaagattctggaggcaaaaactgtagagaacggttgctttatcgaaaccggaaatgaatgggaaagaatacagtatgcaaaagaaattgtagaaagagcagtgaatctgctggattatttcctggagaagtatccgcatgttgagcggattgggctcacagggcagatgcatggaattgtctatgttgacaaagaaggaaattgtgtcagtccgttatatacatggcaggatgccagaggaagtatctgcgatgcggatcagattcctttaacagaagaaatccgggaaagatgtcaaatccatgctgcttcaggatatgggcttgtcacacacatttataatatcagacataatctggttccggattcggctttgagcttctgtacgatcatggattattttggaatgcatttgacagggcgtaaaaaaccattggtacatgtgagcaatgcggcaggttttggattctttgacagccataagatgtgctttgaaaaagaaaaactggctgaaatgggagtggacgtaaattggctgcctgatgtctgtacggaaatagagaaactgggtacatacagagggcggacagttacaacagcaatcggagacaatcaggcaagctttctcggagcggcaggtgatgaggagaatatattactggtcaatatgggaaccggcggacagatttctgttctttcaggtcagtatttttcgggagatggaattgaggcaagacctttcctaaatgggaagtatctgcttgcaggagcatctctgtgtggcggcaaggcatatgcgctcctggaacagtttttccgaaaacttgtaaaagaagcgaccggacaggatcagccattatacaaagtaatggaaaagatggcaagaacagggagagaccagaatagtgaaagaactgaaagtcgaaagattaaagttgaaacaacatttgacggtacacgggtaaatccggaaaaaagcggcagtattacccagatctgttccgaaaactttacacctgaagatttctgctatggtgttctgaagggaatgagcacagaactgtatcagatgtatatgactattcagaaaggaataggtataaagatcaggcgtatgattggttcagggaatggactgagaaaaaatccggtactgtgtgaaattattgaagatatgttcaaggcagaacttgttctggcagaatgtgaagaggaagctgcgacaggagcagcaatgagcagtagtatgtataactatagcaactcccccagataataaaatgaagcagtgaagcggattgtgaataaccaattgattttaatactggaatttgaggaaaggggctgtcctgaaaatagacagctccttctttactgtccgatttattgtatgttattttccggcatggtccgatatgttttagagcatgtcggaaaattttatgaaaactgcaaaaaaattcaggaaaaaaaagacagcattttaaacgctatagaaaaaatgtaatttttgaaaaaacaattattgtaataatctcccgaacgtgacataataagaatggaaaagtaaagggcaggttaaattctgattagagacaggtaaaataacctgcttacattatgcgccgatttcctgggatgaggatggaaatcaggcagacgacaaaggagaaaataatgggaattttttcaatgatattgtcattgctgagcggagtagcgttattcctgttcggtatgtcattgatgggcgacggcctgaaaatggttgccggaaataagctggaagctttcctgtatcgaatgacaaacacaccactgaagggagttgctctgggtactggtgttaccagcgtgattcagtcttcttctgccacaaccgttatggtcattggttttgttaactcaggtatgatgaaactgaaacaggccatcggtattatcatgggagccaacatcggaaccagtattaccggatggatcctctgtctttcttatattgacggaaagaacggaattgcgaagattttatctacagcaacaatttcagcagtagtagcgattattggtattatccttcgcatggcatgtaagcgttccgtgcataaaaatatcggtaatatcatgcttggttttgcaatcctgatgacaggtatgcagacaatgagcggtgctgtttcaccactgaaggacagccccacatttacaaacatgctgacaatgttttccaacccgctgataggtattctggtaggtattgcatttaccgcagtgctgcagagtgcatctgccacagtcggtgtattgcaggcgttatctgtaacaggtatcttgacattctccagtgcattcccgatcgttcttggtatcggtgtaggtgctgcctgtccggttctgatttcagcaatcggtgcgaataagaatggtaaacgtacagcacttgtttatctgatcaatgacctgtttggtcttatcctctggtcagtgatcttctacactgtaaatgctgttgtgcatttcggatttatggatatgattatgtcaccggttgcaattgctttactgaatactgtattccgtgtagcaacagtatgtgttcttttcccgttcataccgaagatcgagcagctggtgtgctggcttgtaaaagacagtgcagaggaactggaagatgaagcagactttgatcttctggaagaacgtcttctgaattatccggcacttgctattggacagtgtcatcgtgccatgagcggtatggcaaggaagcttcgcaagaatgtcaaccgtgccatgaaccttctgaatgaatatcagcaggataaatttgataaggtacagagaaaagagaacctgatcgataaatacgaaagccgtcttggggaatatctgatgaagctcacaaagcatgagatgaacagtgcccagacaaggcaggcatccctttatcttcataccatcaatgactttgagagaatcggtgaccatgcatcctacattgcctatatgtccagtgaaatgcatgataatcacactaatttctcacaggaagcctgggatgagctgaatgtagtaatggaagcagttcgtgaggagatcaatcttacctgtcgtgcattcctcaatgatgacaaagagatggctcagagagttgcacctcttggaatgattatcacatccttatgcaatgagctgaagatgcatcatgtagagcgtctgagtaatggcaactgcggactggaagagggaactgtatatacagacattctcaacagcttcaaccgtattgcagcacattgtgcaagtgcaatggtagctctccttaagagtggagacgagaatccggatatgcatatccatgattccaagatttacccatctgacagcgtggaatattatacatacttcaaggaatatcgccagaagtatgaaatcgtaaagaacgaggaacacatgcgaagcatggaaccggaagaagtagaataatacttttatactacaaagcagtaaatatatatgatataatgacagcagatgatctggaaacggatgtctgctgttttttcgttatagtcactgggcatgcagattgtgggaatgatttttcgaatacgctcctgcgtgtgcaggctgaggagccagcagacagaatcatttgtaaactcattccaaaggaggaaaattaattatgttattcgacagcagaacagtttatctcggtgcatccagggacaaatatgagcagtattgtaaagccttagattcagagaaaatcaaatacaaaacaaagagagtgaaccacgaagaaaaaatgatagctccggacaggggaactgcccgcagtatgggtgggaatttcgggacagataaaacattgtatgaaatcatggtcggagagaaagattacgacaatgcaatggggattctgacagcattgaagtagacggaacctatcctgaagaagaaagtacgcaaaaaagtgtgcaagataatgtgcaagataacggaaatcctagaggtgtcttgtggaagaatgtggggagtttcgccatggagaagactttcccgctctgctgaactgtcttaaatgcattatttacgaagactgctatagttaaactaatattgcctcacctcgacaggtgaggcaattgcatatccgggcatatctgctcaaatatccataattatatatgtaaaattggataacgaatcatacttgacaaaagcttacgtgggagatataatcaactcaaacagaaacgtttcggttttgaaaatgtttcctgaatttatagtaatcagaaccaaaaatatacatcattaattatgaggaggaaaatcattatgccacttgtaacatcaaaagaaatgctggccaaggctcagaaaggcggttatgcagtaggtgcatttaatgcggagaatatggagatggtgaaagcaatcatccaggctgcggaggaactgaaagcgccggttatgattcagacaacaccatctacagtgaaatatggaacagtagaaacttatgcagcgatcgttgcagcagaggctgagaaagcatctgttccggtatgtatgcatctggatcacggcagtagctttgaacttgctatgcaggcaatgcatgcaggttatacttctgttatgatcgatggttccaagctggattttgaggctaatattgcagagacaaaacgtgtggcagatgttgcaaaagcactggatatcccatgtgaagccgagcttggcaaggttggcggtaaagaagatgatctggaggctgaggcagacacaaatacagatcctcaggaggcaaaggagttcgttgaacgtacaggagttacttctcttgctgttgctatcggaactgcacatggcttctatgtaggaactccggttcttgacaaggaacgtctcagtgagatccgccaggttgtagatatcccacttgtacttcacggcgcatctggtttaagtgatgaggatgtcagggattgtgtaaaacgtggtatctgtaaagtgaattttgctacagagcttcgtgcagcatactccagggcagtcaaagagtttcttgcagaaaaaccagacaccattgatccgaaagcatatggaaaaactgctatcgcagcagtgaaggaactggtaatggcaagaatgaaggtttgcggatgcgacggtaaggcagagaaataaagtggcggcaacaatgaaagatatagccagactgacaggacttggactggctacaatctcttcctattttaatgggggaaatgtcagggaaaaaaacagagtaaaaattgaaaaggctattgaggaactccattatgaggtcaatgaagttgccagaggacttaagacaaatgcgacaaagaccataggcgttgtaatcccggagctgaataatatattctgtgctgagattataacagggatggaagatattctcagaagtcacggttatgcaaccatcgtctgtgattgtcgtacagataagaagctggagcaagaggcagtggagttcctgatccgccgcagggtggatgggatcattaatatgccagtggatgaaacaggggcacatctgaagagattccagaaaacaggcaagccgatcgtgctgatagaccgtaagattcagggaattccctgtgacagtgttctggtggataacaaaaaagctgcagaggatgcgatgcagctttttatagaaaaagggcatagaaaaattggaattataggtggccctgaggggatttttacagcagaggaacgtttggaaggatattacacagctcttaaaaaagctggaattcccataaaaaattccctggtatatcgtggtgactatacgatccagggaggtgtcggaggcctggaagagcttgtccgggagaatccggatatgacagcggtttttgtgaccaactatgaaatgacaatgggcgcaatgatcggagtcaatgaattgggaatacagattccggagcagctttctataatagggtttgataatcttcagtttgcaagggcgtgccgtcccaagctgacgatcgtatcacagcccactgacaggattgccagagagattgcaaggattattctggagcatcttgaaaagaaagaagaaagatctgaggaaccttttatggagaaacttcagacagagattatagaaggaaaatctgtaagtattctgaacagataaaatagaatcatgggagcagcaaaatgacgaaatcatatttattggggattgatatcggaacaagtgcctgcaaggttgcggtatttgacaggaatggaaaagttcttgcagcagccagtggtgattatccggtatattatccacatgagggatgggcagagcagaatcctgaggaatggtgggatgcagtctgccgggcaacaaaggaaaccatacagaaggcagatatcactgcagatgagattgcaggaatcgggattgatggtcagagctggtctgcaatcccaattgacagagagggtaacgtgctggccaatacaccaatctggatggatacgagagcacagtctatttgtaacagattgaatcaggagattggacaggagaagatttttgaggtagcaggaaattctcttcagccctcttattctactgcaaagatcctttggtacaaagaaaatcttccggaggtatacgcaaaaacccacaagatccttcagtccaacagctacattgcatttaaactgacgggtgcgattacccaggatgtgtcacagggctatggattgcattgtttcaatatgaagaaaggatgttgggatgaaaagatgtgtgaacgtcttggaatccccatggaatttcttccggaaatctgtgattgtgaccatgtggttgggacagttaccgggaaggcagctgcagagtgtggacttgtagaagggattcccgtagttgccggtggacttgatgcagcctgcggaactcttggtgcaggtgtgatccattccggtgaaacacaggaacagggtggacaggccggaggaatgagtatttgtacagaggaatataaggctgatccgaggctgatcctgagctatcatgttgtcccgggcaaatggctccttcagggaggaaccaccggaggcggcggtgtaatgcgctggtttgaacgtgaatttgcagattatgaacggatgatgaaagaacagacaggtgtctcatctctggaccagctcaataagattgcagaaaaagttgcgccgggctgcgatggaatggtatttcttccatatatgtcaggggagcgttctcctatctggaatccatatgcaaagggtgttttctatggactggattttgcaaaaacaaaaggacatatggtccgtgcctgtatggaaggggtggcgctttccctgcggcacaaccttgaagtggcaaaggaagcaggggcagaggcagatgtattgagagctatgggaggttctgccaattccctgctatggacacagattaaatccgatattactggaaaaccgatcatagtaccggcatccgatacagcaaccacccttggtgcggcacttctggcaggggtgggagtaggcttttacaaagattatgaggaagcagttttacttacggtcaaagagacccgccgccatgaaccagatccaaagaacaaagcagtttatgataaaacttttgagacttatatagaactttataaatctctggcgcacataatgactgcaaaataaaagtagaattcatgaagggagaaatatattatgaaagcagcagtagtagttgcaaatgaagacgtacagtatcaggaaatcgaagaacctaaggtgaccaaaggaactgtcaagatacgtgtcagatattctggtatctgtggctcagacattccgcgtgtcctgaatcacggggttcatttttatccaattgtacttggacatgagttttccggggatgtagtggaagttggagaaggcgtgactaaggtaaaagtgggagaccgtgtttccggcgcaccgcttcttccgtgtatgaaatgtgatgactgtcagcagggaaatttctctctctgtaagcactacagcttcataggctccagacagcagggaagtaacgcagattatgtggttgttccggagcagaacgccgttccttttgaaagcagtgttccgtatgagcagggagccatgtttgagcctgcaactgttgcgatccacggtgtatttcagaatgattatcacagtggcgagtatgttgcaattcttggcggtggtacagttggaatgtttaccatgcagtggaccaagatctttggttctaagaaagtggtagtttttgatattagtgaggaacgtcttgagctggcgaaacgccttggtgcagatgaagtcatcaataccagagacgaaggatatatggaaaaggctatggcaatcacaggtggcaagggttacggttttgtctttgagacagcaggacaggttccaaccatgcatatggcatttgaactggctgcaaacaaagcacatgtctgctttatcggaacccctcatgagaacctgacatttacaccgtcacagtgggaaaatatgaatcgtaaagaattcaaactgaccggttcctggatgtcttacagtgccccttatccgggacgtgaatgggatctgactgcacattattttgcaacaggtcagctgaaatttgatcctggatttatctacaaaaaaattccaatgagtcaggcacaggaagcattccagttatttaaaacacctggacttgtaaaaggaaagattcttttgtcaaatgaggaagaataagatgatacttacagtgacattgaatgctgcaatcgataaaagatatgtagtagatgattttaaaataggagaagtaaaccgtgtacaacaatgtacatatgttcctggtggtaaaggacttaatgtttccaagccagcttccatttatggagcagaggttgtggcaaccgggttcgtaggcggacatgcgggaaactacattgaagaagcgttgaaaccatttggtattaagggagatttttatcatgtggatgcggagagcagatcctgtattaatatctgggatgaagttagccatgtgcagacagaattccttgagccgggttttactttgacagaagaagattttcagggatttgaagagaaattcagagaactggtaaaaaatgctgatgtagtttccatgtcaggtagtgttcccaaggggcttgatggaactgcatatcagagactggtcaggatcgtcaaagaagccggcaaaccggtgattcttgacaccagtgggaaactgctggaaatgggaattgaagcttgtccgacattgattaaaccgaacatagatgaaattcgaatgctgacaggtaaacagtgtgatgacattcaggatattattgaagctgccaaaacaattcatgaaaaaggggttgaaattgtagcagtttcccttggagcagatggctctctggcagtaggaaaggatggcatcttccgtgcggttgtgccgaaaatcgatgcagtaaatacagtaggctgcggagattccatgattgcaggttttgcacttggattgagtcagggactttcattggaagagactttaagaagtgccagtgcgatttcggcagcatcagccatgcgtgaggagactggatttttcgtaatggaagatatggaaaaactgcttccgttaatcaggattaaaaaattataataataaaatcaggaggaaatagaaatggcagaattcattaatccggcgattgtgccgaaagtaacgcttccgtcaggagaaaaagtaccctgtatgggcatgggaacctttggttcagaccgtgtaagtgcagaagaagtatctgaggctgtggccggtgcgatccgcagcggatatcgtatgtttgactgtgcagcgtgctatggaaatgagcatcagattggtgaagttttcaaagcagcctttgatgaaggggtagtagaaagaaaagatcttttcattatgacaaaggtatggaatgatatgcacagaaaggtagaagaagcctgcaccaagagtattcaggatcttcagtgtgattatgtggatttgtattttatccactggccattcccgaactaccatgcaccattctgtgatgtagactccagaaatccggaatccagacctttcagtgtagaggaatttatggatacctaccgtcagtgcgaagagctggtagaaaaaggtaaaatccgctacattggcatttccaatatgactattccgaaactggaagcagtccttccgttaatgaaaatcaaaccagcagcatgtgaactggagctgcatccatgcttccagcagcaggaacagtatgattatctgatcgctcataacatccagccggtaggatatatgcctcttggttctccgagaagaccggaaagagatatctgtccggaggatgtggctgatatgcagacccctgaaatgcaggagattgccaaagcgcatggagtacatccggcactgatcgctctgaaatgggcccatcagagaggggaaatctctatcccattttccgtacataactatgtaagtaacctgaaatgtgtaacagaagatcccctgactgatgaagaaatggccaagatcgctaccctggaaaaaggaaacaggcttgtcaaaggacaggtgttcctgtgggaaggtgcaaaggactggcatgacctgtgggatgaagatggggttattgtaaaataaagtgattagctgacagaagattaaacggattggataaatgtctctacataatgcagagccgctccgattgccggtgtatattgtccgttggtaccgaccagaatctgtgttttatccagtataaatggtgcggctgtatggagatgttctgtcagatattcaatatcttcctctgtaaaataaggtgccagatatccgctgaggataatcggtgcatcaataataaggttaagattcttcatggcaaatgccagatggtttaaaaaatctttccagatttgtatgatctggggagattttttttcgcgcagaagagggaaaaattctttggcaggcatatctgcagcctgttccagtgcattggcagaacagtaggtttccaggcagccacggctgccgcagtagcaaagtgggccgtcgggattaatacatatatgttcaagagttccgctgtgcatggagatcccctgatgaatctgatgattggtaatgatgccgccgcccagatttcggttcagcaggatgataacagcactgtcaagctccggatgattccataattcaaggaacgcagctgatttcgaatcatgttccagataacagggatatggaagatatctggaaaaatcatccagtttcatgcctgtgctattcatgatatctccatatagtacggtggtatgattcggggatgtgataccctgtgtagcaatggagatgccaagaactttgtcattgtcatactggcgcgatgagatgaattcttttactgcgtcagtaacctgtttatagtaatccggtgtgttggaatatggaagcggaatggtatctgtatagaaagcatttccatataaatctacagcagtaatgtgaaacatcccttttaaaataccgatgccaatggaaattttaaaatctgatacaatctgaagggcgtttgcctttcttccaccggtggattcaaagaaaccatttttttcaataagaccttcctgttccagaagattcaggttctgactgacagtggataaacccatctgcagttcctgaacgatctgtagcttggaggtcgttttttttctgtaaatgtactggtaaacctttgatttatttattttcttgagactaatgttggtcaatcccttttcactcataatattctcctgattatgttacaagataatgttaagtttcagttttattgtagcatagaacgaaaaaaaaacaataaaaatatccggcacgatcagcaacatcaatttgtcagcacactatagtaaaatagacaaaaaagttgtttgaaaattagaatttctgtcaatggattttttaaaagaaaagatatatactcaacttacagttaagatataaacgtaagtaaagaacataacaacaaacaataagtatcgaataagacaaacaaggaggatataacatgaaattatcaatcaatggaatcaaggaacaggaagcatggaaaaaggcaggaatcgctcttccgggttatgatgtagaggctgcctctgagaatgcaaaggagaatccggtatgggttcactttggtatcggaaatattttccgtgtgtttatcggtggaattgcagatggtcttctggaagagggagttctggatcgtgggattacctgtgtggaaacctttgattatgatgtagtagataagatttatgatccatatgacaatcttggattaagtgtaatcctgcatggggatggaacccgtgagtataaagtagtcggagcttttgcggaagcagtgaaggcacagtcttctaatgcagaacagtggaaacgcctgaaagaaattttcacaagcaaatccctgcagatggtttcctttacgatcacagagaaaggctatgcattacagaaagcggacggaacatggttcccgtttgtagaggcagatatcaagaatggtccggataaagcggctggtgccatggcagttctggttgcaatgctttatgaaagatataaagcaggaaaatatcccatcgcactggtttccatggataactgctcacagaacggtgcaaagcttcgtgagtcagtactgacaatgacagaagagtggaagaaagccggatttgttgatgagggatttgtaaactatgtaagcgatgagaaagtagttgcttttccatggacaatgatcgataagatcacacctcgtccaagcgagcagattgcagcagaccttgagaatctgggtgttgagaacatgcagccggtgatcacaggtaagaagacatacattgcaccatttgtcaatgctgagaaaccgcagtatcttgtaatagaggacagcttccctaacggacgtccggctctggaaaaaggtttcggtgtatatatggcagacagaaatacagttaacctttctgaacgtatgaaagtaacagtatgtctgaatccggttcattctgctacaggtccgctgggagtagttcttggatatgatctgtttgcgcatatgcttaatacaaatgaagatatgatgaaaatggcacgtatgattgcttatgatgaaggtcttccggtagttgctgaccctggaatcctttctccccaggcatttgttgatgagctttttaatgatcgttttccaaatgaatatcttggagatacaaatcttcgtctggcagtagatgtatctcagatggttggtatccgtttcggcgaaacaatcaaagcatatgtaaagaaattcggagatgcttccagactgacagctattcctctgggaattgcaggatggctcagatatatgcttggtgtagatgatgaaggaaataaatttgaacttgcaccggacccaatgaatgaggaactgcaggaacagtttaaggatattgtagtaggtaaacctgaaacatttaaggatcagttaaaaccaattctttccaatgagcgtctgttcttcactgacctttacaaagacggtgtgggagagaaggttgagaatatgttccgtgagatgattgcaggacctggagctgtaagagcaacaatacataaatatgttggatgattttcatcagatggatattataactgactttcaggaggaaaatgaaaatgaatttaaaagaacagtttaatggaattcagcatattggaattccgaccaatgatattgaagcaaccattgatttttataaggctctgggatttgaaattgcttttcgtacagtaaatgaggaagcagatgaagaggttgcttttctgaaattaaatacacttgttgttgagacatatgagaataaagcagctaagatggaagccggtgccatcgatcatatggcgattgatgtaaaagatattgaaaaagtatatgaaatgattaatcaggcaggattaaatacaaccaacgataccgttcattttcttcccttctgggaaaacggagtaaagttctttacaattgagggaccgaataaagagaaggttgagttcagccagtacttataaagtcaggcggttaaattcagcgagaaaaagcatctgtcaaagcaggtgctttttgttttcaatattttattgagaaaagcctgagaaaagtttaaaataggaaataataaaaaataaatgaaaggagtttttatcatgagtaaacgaacagagagaatgagccggagtgcagctgagagaatcaaccgcaaagataccgtgatcagacagaataatgcagaactcgaggaactgaggagtcagtatgagaatctggatatctgtgaggaggataagcaggtgattgatgattatattgcctgcaaagatgccagagctgacaggatggcagagaaactctatgaaaagggacgaaaagatgtaaagaaatgtatccgcatccgaaaactgatccgcagatgcatgatcctgtctgccattgttacggtggtactgattcagtataataagaatgagaagctgagagaaagtctggaagagctgctgaaaatgttccgggatagaactgtaaatgaatcagaggaagatttttaaaatgttttaccgaattcggttacggtagaacgaatgtgcttatgtatcagttggaaggaataagcaatataaataatgcagacaaaaatgtattttcggaattaaaaaaaatcttcttacaaaagcagaaacaaggaagactctaagagtgcataaaaccaaaaaggagcaagacagcatgggaacacaaagatactcaattctgtacagcagtaaaacaggaaatacaaaaaaacttgcggagaagatcagggaggtattgcctgaggaaaactgtgattattttggaacagaaggagcgaaggctctctcttccgacatattatacattggattctggacagatatagggaatgcagatcctgcaacacttgaactgttaaagagtctgaaaaacaagaagatctttctgtttggaacagcaggtttcggaggcagtgaagcctatttccagcaggttctcgggaaagttaaagaatctgtggatgagagtaatacagtaatcggagaatttatgtgtcaggggaaaatgccccagtcagttagggacagatacgtaaagatgaaagagaagccggatcatgcgccgaacctggatgaactgatccagaattttgacagggcgttatctcatcctgataatgaggatctggagagacttgaagaaataatcagaagagacctggaaaaataattaagtcttgactaacagagggaactgcggtatagtgctcgttactaaaaaaggtaattcataaatttttataaattttcacgaaagagaggtaacgagacatgacattttatcaggaattacaattgagttcgaccggctccaaacagctgatcagaagcaccacagatcccaaagagaaaagacggcacattttaatctataattttaaagtgtatctggttatggctttttgcgtagcagtggtgagcatgtacagtaagcttacagggagcagcaacagtgtagttggtgttactgttctgttggcagtgcttgtgctgcggcaggcagatttcgggatcaggacaacacatggactgctttccattgcagggatcttcggtattcttatggcaggaccccgtctggcaaatatagtgcctccgttagccgcgtttgcagtgaatgctgtgtgtattttactgctgatgatactgggctgtcataatgtgatcatgtacaatcattctacctttgttctgggctatttgctgcttctgggctatgatgtgacaggaaaggaatacaccttccgtgtgatcggcttgttggtgggaatggtgatctgtatgatcgtcttctataagaaccagagaaacagagcctatcgaagaaccttcctggatttgttccgggaatttgatcttaagtcagcaagaagcagatggtatgtgaaactgacactgattgtatccagcgcaatgctgtttatgaatcttctgggacttcccagagcaatgtgggcaggaatcgcctgtatgtccgtatgtctgccttttacagaggactgtatcccaaggtctgtgagcagaggaatgtttaatgttgtgggctgtctgctgtttattgtgctgtatctggtacttcctaaatccatgtatccgtatattggaatgatcggagggatcggagttggatattcagcaggatatccgtggcagactgcatttaatacatttggagcgttgtctattgcagcagggatcttcggaatgccggcagcaatagcacttcgtataggcgccaatgttctgggagcagcttatacggtaatctgcaataaagtaacagataaagtagcagagtatataggcacaaataaatgtgcagaaaatctttcctgactgaaactgcggagcggttataagcaagtaaaaaagcggatgattttatccgtctgatatgtgttctgggaatagagtgaatattaacgtacaatgacagagggagagagaaagaatatgaaacaggataccctggaaggcagggcgaaaacgaaaaatggtgtaaaacgattatgcttttccgcagtatgtattttactggaagcagcttttatcattgctatgatcacaaagctgaatcaatatgcggagattatcaatctgatgacaaggcttcttgcaggtgtactggttcttaagctgtatgcgtcagaccagacttcatctatgaaaatgccctgggttattttaatccttgtattccctatcctgggagtgggattgtacttactgattggtctcaatggcggtacccgtaaaatgcgggagcgttatgaccagatcgacagggaacttctgccgttgcttcccaatgacagtgagtgcagggaaacgcttggcaggaaaatcccgaaggcaggcaatatttctgattatatacagaaaaatgcctcctatccggtctatcagaatacagatgttatttattatgatgaggcagtcaaagggctggaggctcagctggcagatctggcaaaggcagagaaattcatttttatggaatatcatgccattgaggatgcacaggcctggcataaaatccagagagttctggaagaccgcgtaaaggcaggcgtagaagtcagagtattttatgacgacatgggttccattgggtttatcaatacagacttcattaagaaaatggaaaatgtgggaatccattgcagagtgttcaacccttttactccgggtctgaatgtgttcctgaataaccgggatcaccgcaagatcacagtgatcgatggaaaagtgggatttaccggcggttacaaccttgccaacgaatattttaatttcacacatccttatggacagtggaaggatacaggtatccgtctggagggggaggcagtccgttccctaacagtaacattcttggagatgtggaatgctgtcagtgataaggataaaaatgacagtgattttaccggatttctggttcagacagattatcaggcaaagcagacaggctttatccagccttatgcggacagtcctatggaccatgaacaggtaggcgaagaggtgtatatcagtatggtgaacaaagcagaaaaatattgctggtttatgactccgtacctgatcatcacagatgaaatgagccatgctctgtgtctggctgccaagcgcggggtagacgtgagaatcatcacacctggtattccggataaaaagatgatctacaatatcacacgatccttttaccatggactggtgaagcatggagtgcgtatctatgaatggacacctggtttctgtcatgcaaagataagtgtggcagatgactgtatggcaacctgcggaaccataaatctggattacagaagtctgtatcatcattttgaaaacggctgctttatggcagactgccaggcagttctggatatccgaaatgatcttgcagcaacaatggatgaatgccgtgaagtcacagaacagtacagtaccggacgcagcgcatatctgcgattgggacagctgtttatgaggttatttgcgggattattataacacttggaaaaaagcagaatatcgtgtacaatggaatggggaacagcaaaactattataaatatgggaggaattttaactatggatctttcaaccttagtaaaaatgtcaaatacttatggaagcaaccctgcctatgttcttgcaggcggtggcaatacttctgtaaaagatgacaccacattgtatgtaaaaggctccggtacacagcttgccacaattaaggcagaggaatttgtggaaatgagcagagcacgtttgaatgagatcatgaaaacagattatccggaagacgatgtcaaacgtgaatcgctgtatcttgcagatgttatggctgcagtaacagatgctgacaaaacaaaacgtccaagtgtagaagcactgcttcataacttatttgcctatacttatgtactgcatgttcatcctacacttgtcaatggactgacctgcggaaaaggcgcaaaggaactcagcgaacagctccttggaaaagatgtactctggatcgatatctgcaaacccggatatacgcttgcacgtatctgctatgagaaaatgaatgcttataaagaagaatacggaaaagatgttcaggttcttctgctccagaatcatggaattttcgttgcagcaaatactgtagaggaaattggagcattatttgacggcgtgagcagtaaattagagaaacaggtaaagagaactgctgatgtcagtgatgctgttacatctgaaaaagaacaggcagcagagaagctttcccggttactgggacatgcagtagaagttgtacctgtagcagaagctgatcattttgtaaaagataaagcagcggctgcaccgcttctgaagccgtttacaccggatcacattgtatattgcggaccatatccgttatttgtagaggatattgaccaggcaaaagctgcgctggatgcatttatggcagagaatgacaaagagccaagactgatcctggtacagggagtcggtgcctttatcatggaagatgataagggaaaagctgcaaaagcacagcttcttgtaaaagatgccattaagcttgcagtatatgcagaaagctttggcggtccgcttcatatgacggatgatattacatactttatcacacattgggaagcagaagcatatcgcagtaagaaataatataataaggggctgtctttttttgacagccccattttgttggtttaaacactatatttttaaaggaaaaggtttattttcagcaaatcttatttctcttcttttttctctttggctttcccggattcaggaatatttccctcaccatagtaagctttcagatagatttctttcagttcagacattaatggatatcttggattggcaccggtacactggtcgttaaatgcctgttcggtcatttcgtccagagtttcaaggaagtacttctcgtctacgccgtattccctgatcgtatgtttgatctcaatagtatccatcagttcctgcagtttttggagaagcttttcaaatacttcgctgtcgttcttgcctgtcagacctacagaacggccaatctcagcgtaacgtgcaagtgtgtgcggatactgatactgtgggaaggtacccatcttagccggaacttcggctgcattatagcgcagaacatgaagcagaaccagagcatttgcaataccatgtggaagatgatggaaagctcccagcttatgagcaagagagtggtttacgccaaggaaagcatttgcgaaagccataccagccatgcaggaagcatttgccatatgctgtcttgcttctacatcagaaccatctttgtatgcacgtggcagatagttaaataccagtttgatggcatttaatgcaagaccatctgtataatcagatgccatcatggaagcataggcttcaagtgcatgagtcataacgtcgataccggaagcacaggtcagtcccttaggtgcgctcatcatattatctgtatcaacaatagccatgtcaggcattaattcataatcagccagaggccatttgatacctgtagtcttatcagtaatgatagcaaaaggtgttacctcggaacctgtaccggaagatgttggaacagctataaagtaagctttcttacccatatgcgggaatgtaaagattctcttacggatatccataaagtccatagccatatcatcaaagttggcgtccggattttcatagagaacccacatgatcttgccggcatccattgcggaaccaccgcccattgcgataatgcagtcaggctcgaacattctcattgcagcagcaccggctcttgcagaagcgagagatggatctggctctacatcgtagaagcaggtatgtacgattcccatctgatctaatttatcttcgatctttttagtatatccattcttataaaggaaagagtctgttacgataaagcagcgtttcttgtgcataacagtgccaagttcatccagagcaaccggcaggcagccttttttgaaataaactttttccggtgttctaatccagagcatattttctctcctttcagcaacggtcttgatgttgataagatgtttcacacctacgttctcagatacggagttgccaccccaggaaccgcagcccagagtcagggacggaacaagtttgaagttgtaaaggtcgccgatgccgccttgagaagatggagtattgatgaggatacggcaggtcttcatagctgctgcatgtttttccatcttttccttctctcttgtgtcaatgtagagagcggaggtatgtccataaccgccgtcagctacaagctgttcagctttggcaatcgcttcgtcaaaagttttggccttgtacatggccagtacaggtgaaagcttctcatgtgcgaattcttcgctgatgtctacagattcaacttcgccgatcagaatctttgtttcaggagaaactgtaataccggccatctcagcgatagtggcagctttctgacctacgatctttgcattcaatgcgccattgatgaggatagtttttcttactttctctaattcatccggtttcaggaagtaacatcctctgtaaaggaattcttcttttactttcttataaatgctctcaagaacagttacagactgttcggaagcacatatcataccattgtcaaaggtcttggaatggatgatggagttaactgccagacggatatctgcactgtcatcaatgataacaggagtatttccaggacctacacctaaagcaggttttccggaagaataggcagccttaaccattccgggaccacctgtggcaaggatgatgtctgcttcgcgcataacctgatttgtcagatcaagacttggaacatcgatccatccgatgattccctccggtgcgccggcttctacagcagcctccagaacaacctttgctgcatcaatggtacatttctttgcacggggatgaggactgatgatgattgcattacgtgttttcagtgcaatcagagttttgaagattgcagtagatgttgggttggttgtaggaataacagcagcaatcagaccgatcggctcagctattttcttaataccgtaagcagtgtcttcttcaatcacaccgcaggttctggtattcttatatgcgttgtatacatattcggctgcgtaatggttcttgataaccttatcttctacaatacccattcctgtttcttcaacagcatctttagcaagcgggatacgtgctttgtcagcagcagtagcggcagctttaaaaatcttatctacctgctcctgggtaaatgttgcgaaaatcttctgtgcctctttcatggctgcaatctttgcagtaagggcttcaggggtgtcgatgatggttgggatagtgttctctttttttgccatttgggaatcctcctgtttgtgttttcgttaaaagtatttaccgtgacctgttatgtttttattatataaataaactgattattcggtcaacagtaatattgatatgagtataacgaaatattatggtgaaaattgtgcataatcacgtaaataatgtgaataaaatatcaattgtcagaatatatgagaaaaatttaacaatatatgttctgttggcaactgagagaaagttaaaaaaataacgttaataaattaacaacctcgatgatgctattatatgactttgttaatcatttgtcaattacatagcatatgaaaaagttaacaaatactaactaggaatttcgtgaaaatataacaatataatttgtagaaggatttatgtttttccatatgtttgcaggagattaagagttactgtgaacggagtgaacagtaatgattaagaaaaattaagccccgcaaaatctgcggggcttaatttttcttaagtttctatttgtttcaggcttttctgaaagcggctctcttacgttctctggaatccagaagtctcttacggatacggagagataccggtgtaacctccagcagttcatcctgatcgataaagtcgatcgcctgctccagactcagaactctaggcggagttaacttcagcgcatcatcagcagaagaagaacgtgtattagtcagatgtttagtcttgcatacattcaactcaatatcctcagccttaccattctgaccgataaccataccactgtaaaccttagcgccaggtccgataaacagagtaccacgctcctgagctgcgaacagaccataagtaacagcctcaccagcctcaaatgcgatcagagatccctgttttctgtactggaaatctcccttataaggtgcatagccgtcaaacatagtattaatgataccagtaccctttgtggaagtaaggaactcaccacggaatccgatcagtccacgggaagggatgtggaattccagacgtacagtgccgtcgctggcagtactcataccctgcagttcacctttacgttcgctcagtttctggattacagtaccggaaaattcttccggaacatctacataagcaatttccataggctcaagcttcttgccacgctcgtctgttttatacagaacttccggtttacttactgcgaattcataaccttcacgtctcatgttttcaatcaggacagacagatgaagttctccacgtccggaaactttaaatgcctcagttgtatcagtgtcttctacacgaaggctgacatctgtgttgagctcacggtagagacggtcacgcagatgacgggaggtaatgtatttaccttcctgaccggccagcggactgtcatttacgatgaagttcatggcaatagtaggctcggaaattttctggaaaggaatagcttccggattatctcctgcgcagagagtatcaccgatatggatatctgcgataccggaaatagcaacgatagcaccgatagtggcctcttttacttcaactttgttcagaccgtcaaactcgtagagcttgctgatcttaactttcttacgtttgtccagatcatgatggtttaacagagtcagttcctggttaacagcgattgtaccgttttcaactttaccaacaccgatacgtccaacgtattcgttgtaatcaatcgtgctgatcagaacctgagtatctgcctccggatctccttccggagccgggatatatttcaggattgcttcaaataacggagccatatccttaggagtgtcgtttaagtcgatcacagcatgtcctgctttggcagaagcatacaggaacggacagtcaagctgttcatcagaagcaccaagatccataagaagttccagaacctcatctacaacttcatccggacgggcttccggacggtcgatcttgttgatacatacgattacatgaaggtcaagttccagtgctttcttaagaacgaattttgtctgaggcatagcaccttcgaaagcatcaacgagaagaataacaccgtctaccatcttaagtacacgttctacctcgccgccgaaatcagcatgtcctggtgtgtcaatgatgttgatttttgtatttttgtaatgaacagctgtgttcttggataaaatagtgataccacgttcacgctcgatatcattagagtccatgacacgttcctgaacttcctgattctcacggaatacaccgctctgtttcagaagctggtcaaccagagttgttttaccatggtcaacgtgggcgataatggctacgttacggacatcttcacgttttgttctcataaaatgattttcctttcctctttaagctttgaatgggtaactgttcggcacactggctgaacagttaccggaattgttaatattcatgtgttatcagcaggattattttgcttcaaaagcatttttcaagcacgatataatcttgcagatgaatttgttcctattattatgtgttttttttcaataagttacccgaattttcagtttaccacattttcgccagattacaaggtgttaaaataattttttttatttttgcagattctggttctaaatgagaatgcctgtacataaccttataaagaacaatacaaggtacagaggagcatatgcgggatcgctgaaaaagcagagacgatttacggtctgtactgcaggcagggattctgacataggtgctctacagggaaggagaaccacattatggcagataaaattattgaaaacaatcaggtatctatgatgggcaaaattgcagcaggctttacattcagtcatcaggtctttggagaaggcttctatatgactgagctgctggtcaaaaggctcagtgattcggaagacaggattccggtgatggtttctgaacggctggtggatgtaacgcaggattatatcggagaatatgtggaaatccatggacagttccgctcatataaccgccatgaggagaagcacaaccgtctcgtgctttcagtattcagcagagaactgaagtttgtggaagaagaggatgaaacagttccggtaaatcagatttttctggacggatatatctgtaagcctccggtgtaccgtaaaactcctcttggaagagaaattgcggatgtgctgttggcagtaaatcgtccgtatggaaaatcagattacataccatgcatctgctggggcagaaatgcccgctatgcatctgcgtttgaggttggcggtcatgtcctgatctggggacgtatccagagcagagaatatatgaaacggatcggggaaaatgaaacagagaagagagttgcgtatgaagtatctgtaagcaagctggaatatatggaataattccattgccgcaggcaatttggaatgaattttggccacgttactgtgaacggagtgaacggtaacgattactgtaaacagtaacacttgcaattcttcataaactgcggtaatataagcgtattcagataactatggcagcctgctgttccacgaagcattccggcgtgaatatgccggaagctcatcgcagaagtcgaaaacagactgctgtttatcatgtctgtaatgacacagagaagaaggtacaatttcaataacgataagaggaattgtttgttatggaaaaagaatttacagaggtttactgtggcgggggaaagggaaagacaactctggcgatcggtcagtgtctgagagcttccgcacagggtaaaagcgtcattattattcagtttctgaaaggaagagagcgcagggaactggattttctggaggaactggataatctggatattaagatattccgttttgagaagcatgatgaaggatatgaggagctgaatgagcaggagaaggcagaggagaaaatcaatattctcaatgctttgaattttgcgcgcaaagtgatcgcaacgcaggaatgcgattttctgctcctggatgagattcttgcacttccggattacgggatcaccactgcagaggcaatcggtgatatcctgaagatgaaggacgagagtatgcatattctgcttacgggacggacgttaccggacagcctgcgtaaatatgcagacagcataactacactgacaacagagattgtataaggtgtataaaacctgattattgtttatgaatggacagtaatctgtatggaaattacagaagaataaaggaggaaggcaaatggcaatttttaaaggtgcaggtgttgcaatcgtaacccctatgtatgaagatggcaaggttaattatgataaactggaggaacttctggagtatcagattgcaaacagtacagatgcgatcattatctgcggaacaacaggagaatcatcaacgatgacgcatggagagcatcttaagacaattaagtttgcaatcgacaaggtaaacaaacgtgttccggttatcgcaggtacaggttccaactgtacggaaactgcaattatgatgtcaaaggaggctgcttcttacggtgcagatgcacttcttatagtgactccatattataacaaggcgactcagaaaggactgatcgctcattatacagctattgcagaggcagttccggaaacaccgatcattatgtacaatgttccgagccgtacaggttgtaacattcagcctgcaacagcagtagctctggctaaaaatgttaagaatattgttggtatcaaagcagcaagcggagatctttctcagattgcaaccatgatgtccatggctgatggctgcattgaactctactccggaaatgatgatcaggtacttccgatcctttcacttggcggacttggagtaatttccgtactttctaatgtagctcctaaggaaacacatgatatggttatgaaattccttgaaggagatacaaagggtgcagcagaaatccagttaaaggcaatcccgttaattcatgcactgttcagtgaagtaaacccgattccggtgaaagcagctctgaatctgatgggtaaagaagtgggaccacttcgtatgccattatccgagatggaagatgcaaacaaggcaaaacttgctgaagaactgaagaatttcggaattaaacttgcataaatataaccgcaggattgttcggaaaatcaacttgccgatatactggaattgagaggaatagacaaatggtaaagattattatgcatggctgtaacggtcacatgggtcaggtaatctccggacttgtggagaaggatccggatgctgagatcgtagcaggtatcgatgtggcagatcagggaaagaacagctaccctgtatatacaaatatggaagaatgtcaggtagaggcagatgcccttatcgacttctcttctgcaaaagcaacagatgcacttcttgcttactgtgagaaacgcaaactcccggttgtattatgtacaaccggtttaagcgaggagcagctcgcaaaggtggaagagacatctaagaatgtcgcagttctgaaatctgcaaatatgtctcttggaatcaatactctgatgaaactgcttcaggatgcggcaaaggttctggcaacagcaggatttgatatagaggttgttgagaagcatcacagactgaaactggatgcaccaagcggaacagcacttgcactggctgacagcattaatgaggcaatggataaccggtatcattatacctatgaccgcagccagagacgtgagatgcgagatgataaggaaatcggtatctcagcagtccgcggtggaacaatcgtaggagaacacgaagtgatcttcgcaggtccggatgaagtgattgaatttaagcatactgcatattccaaagctgtatttggaaagggtgctgttgaagctgcgaaattccttgcaggcaaaccggcaggaagatatgatatgagcgatgttatcagtgcaaaataatcaggaatgcagtaaaaattgataactggtaattttcagtatctttatagcagtgaaataaaatatataaaaggaaagtgtatctgatgtttcagaacactttccttttttgtaatattggcctgtatgctgctataataattctgatcaatgattatatgcgtaagtcagcaatgttctggaatcctgccagcggacagaagatgaatctgcacccaggacaacggaaatataggtgtttccccttgcggaataagaaagtccgacaaaacaatagcctgctttgttggtatagcctgttttcataccctgaactcccggaacattgccgagcagggcgttggtggtgccgatagaatagcttctgccggtgttgagattagagaaagaataatagccggtgctcaccagtttgcggaacataggctttttgatcgcatactgggcaagttttgccaggtcagaagctgttgtgtaatggttataccctgcatccagaccatttggggttgcgaaatgtgtattcgtacatccgatctctgctgcttttttattcattaatttaacaaactttgcagtggaaccgctgacgtgttcggcaatggcaactgcggtgtcgttgtgggagggaagcatcagggaataaagcagatctttcagataaaatatttctcctgcatttgcataaagcttgctgggttcaatagatgctgcgtaaggggagaactttactttttcgtttaatttgcagttttcaagtgcaaggatacaggtcataatcttggttgtgctggcgttggcatgagcaacattttcatttttgccataaataatctgaccggtatctgcattcatgagaagtgcacagtcagaggaaagggaataatttaatccggtgtgggtgacagtaccattctggttaaagtaatagtaagttcccttgatcttgtgttttcctgtaattgcttttccgtctttgccaaaatagtatttctttccggatttgtcagtgtaccatccggtaaccatggcaccgtctttactgacatagtaataatttcctttatatttgataagagaattctttatcagatatccctgagatctggttccgaaataataatttttgcctttgatcgtatgccagctgcaccagcggtgtccgagtttgttaaaataataggtctttttgtcaattttcagaaatacatttttggcgatggttttatcatcatagcggtaaatccagtaatcgccgtcttttacaaattttcccgatgctgcgatatcaggtttctgaagtgtggatgcatagattgtagaaacactgcaggtaaacagcaggaaaagtgcagccagaaatatgaaaacagagctgcgaagtgaatggttcctttttcttttcatgataaccccctgtaaatatgagttatagatattccgtaaaatactgcagtcaatccatctcattaatgagtgaaatcctgctatagcaacttgtcggtacgctagattgtgggagtatatatgtacggagtaatctgttttgtgttatttaaatcatagcatgaaaagtaaattttttccagaatagtattgagtttttggtacatattaaaaacataatataaaaacatgaaaagacggagaggttctgctgcatggaccggcagaatgctttccgggaacaggagatgaatatgggaataaaggtaaaaaagattctgacaggtacagcacttattatgtcactgtgcatgttcacagcatgtggaaatgcaaataaagcagctgatgaggcagacacaaacgaagaaaatatgacggataataatgctgcaaacgatgataacatggaaaataacgcaggagaaaacaatacaaatggaaatagcacatcaggaaacaatgcggcagataaaaatgtaaataatggtggaaacgtcacagacaatggaattgccgcagaggatgaagctgcagaaaatgagacaaaacagaatagcaatgcaacagataacactgcagataataccagaattgatgaaaacaacaacggtgacggcacagtatccggtgaactgggaaacagcgtcaaagatctgggcgaaggggtaggtaatgctgtagaagatgtaggcgatgctgtaggcaacgcagcagaaggaagatagacatcaggaataatttatggtattatcgtgttaaattggtaaaatttaaataatgtactcccgaagtttttattgcatttgtttttgcatctaactatagcaatcattgtaaataatgcatattgattcagctcatcagagcgtgaaatccgttactgtgaacggagtgaacagtaactgaaatcctgcgtcagcacgcctgcagatatcttccttgtctttcgcactctgctgaactgtctcaaatgcattaatttaagaggcttgctataagtacaaaaagattctgagagtacatataacggatatggaggtacggatttcatgaaatttcgcccatgtattgatatacataatggaaaagtaaagcagatcgtaggtgggagccttacggacgtacaggatcaggcaagtgagaattttgtatctgagcaggatgcatctttctatgcagaattatataaaaaggcagggataaaaggaggacatgtaattctgttaaatggtcatgactccccatactatgaatcaacaaaagaacaggcgattcttgcattacatacttatccgggaggattacagatcggcggaggagtgaacccggaaaatgcaggggaatatcttagtgcaggtgccagtcatgtaatcgttacatcttatgtatttaaagatggaaggatttcctgggaaaatctgaacaaaatgaaagagactgtgggaaaagagaaactggttcttgacctgagctgtcgcagaaaagatggaaaatactatattgtgacagaccgctggcagaaatttacagatgtcactatgacactggatattatgaaagaactgggaagttactgcgatgagtttctggtccatgcagtagatgtggagggaaaggcacgcggagttgaaacagaacttgcatctctgctgggggagtataaaggaaatccggttacttacgcaggtggagttggctccatgaaggatattgaggatttgcgaaaatatggaaaagacagactggatgtcacagtaggcagtgcattggatctttttggcggaaatatttcattctcagaactgattaaactttaactaatttttatagtaatctcaggaatcacagtgaaaatgtacagaacaattacagaatttttgctatttccccataatgacaaaggaactttaaagttatttctgaagtaaacagaaaaaatgtgaaattttaataaaatagtgttaaaattcaaaaatgtgtgttataatagattcatcaaacagcaaaggggatggaagcatgaagtttatcatcagcggaaaaaatattacagttacagaaggtcttaagacagcagtccaggacaagctcagtaaactggaaaggtatttcactcctgacaccgaagttgtagtaactttaagtgttgaaaaagaaagacagaaaattgaagtgacaatccctgtaaaaggaaatatcattcgttccgaacaggtaagcaatgacatgtatgtatcaatcgatttggtagaggaagtcattgaacgtcagcttcgcaagtacaaaaataaaatcgtagacaaacagcaggcagcagccaacttccagaaagcatatctggacaaggactacgatgaggatgaagaagttaagatcatccgtaccaagaaattcggaatcaaaccaatgtatccggaagatgcatgcgtacagatggaactgctcggacataatttctttgtattctacaatgcagagacagagcaggtaaatgtagtttacaaacgtaaaggcaatacttacggtctgatcgaaccggaattctaaatctgcttataagatcaaaaatatgaaacatagacagccataaaaaagttttcataaagaaaagcttccttacagagagacaaaatgccccctgtaagggagcttttttgtcaggaaaaatatatacctttagcgcataaggaatgctttgacgcagtggcctaaatatgttaaaatatcaaaagatattatgaaatttgtaactgatcagcagttaaaaaattacaagttgaaattcattccggattgcctgcggcaatggaatattgacttgtatattctggtggaatggattgctgaagaacagttatcgaaattttataaatgaagaagtgtaaaaagaaggaaggagcacaaaaatcatgagaaaagccggagtattaatgccagtttccgcacttccgtcccgtattggtgccggagaacttggagaatctgcattccaatttatcgagttattaaaggagaatcatgtaaagatatggcagatactgccactgaatccggttggctatggtaattccccataccagccatattcctcctgtgcaggggatgagttgtatatcagtcttgatgcgcttgcagaggaaggtctgttgaaggaacatccaaaggaatttcaggagagagctacaagagtagattatgaggctgtccgccagtacagagagcctttcttaagaactgcgtttgatgtttttatagagaaaaagggacaggaagaaacagcatataaagaatttgcttcacaggaatgggtatatgagtatggtgtgttccgcgcattaaagaaagcaaataacggagaatgctggaatgactggccggaagaatatagaacctggccggagaacagagagaagttaccggcagaggtggagacagaggcgcagtatcagatgttccttcagtatattttctacacacagtggatgaaggtgaagaaggctgcaaacgatgccggaatccagattatgggagatgttcctttctatgtgggacaggattctgtagacgtatggggtggaaaagataactttcttcttgatacagatggacgtccgatcttcatcgccggagtaccgcctgattatttcagtgctacagggcagagatggggaaatccgatctatgactgggagcatatgaaggaacaggattacagattctgggtggacaggattggctatagcaacaaattgtttgatattataaggatcgaccatttccgggcatttgatacatactggaaaattccggcagactgcccgactgctattgacggtgaatggatcgaggcaccgggatatgaggtcattgatacacttcagaaagaaattccggggttagatctggtagcagaggatctggggctgcttcgtccggaggtcctgatgctgaaagatcattatcatctgaagggaatgaagattctgatcttctccatagaaacaggtggaaaatatgcccgagataccttccatgatgtggaaaacatgattttttacacaggaacgcatgacaatgatacgatcatgcagtggtatggaaatatgagtgccgcagccagaagaaaaatccgcaggatgttaaagaaggcgggagcatcacagggctctgtcaaggacagattcctccagtataccatgcagaatcaggcagaatatgcgatcattccgttggcagatattcttggacttggaaaagagggccatatcaacacaccgggaaccattggttctccgaactgggagtggcatttaccggattttatacaggccaaaaaggaactgcagaaatttggcagactgatcgtggatacaaagcgataaattttggtgactccgtaattttcttggtttgttcatgaaaaattcattgttttccataacggaaagtgttagaatatataagtattgtgtattatagtaagcgtttgtaatgttcgcatgctgctgacatgtctgctgtggacggagtgaacagaaattattccgcacagtagcaattgttatatggcagcaatgcttgtataaaaaagaaataaacaggagtaaaacctaatatgaatatgttttcaaaagtattcgggacccgcagccagcgagaggttaagcgtatcatgcctctggttgagaaaattgagagcctgcgcccggacatgcagaagttaagcgacgaagaactcagaggaaaaacaagagaatttaagaaacgtcttgaagagggagagacactggatgatctgcttcctgaggcatttgcggttgtacgtgaagcaggcaagcgtgttcttggaatggaacatttccgtgtgcagcttatcggtggtatcattctccatcagggacgtatcgcagagatgagaacaggtgaaggtaaaacacttgtcgctacacttccgtcatatttaaatgcactggaaggcaaaggtgtgcatgtcgtaacagtcaacgattacctggctaaacgagatgcggaagaaatgggaaagattcatgagtttcttggcctgacagtcggtgttgttttaaatgatatgaagcaggatgagcgtcgtgctgcatacaactgtgatgttacctatgttacgaacaacgaactcggtttcgattatctgcgtgacaacatggttatctataaagaacagctggtacagagagatctgcactactgtatcatcgatgaggtcgactccattctcatcgacgaggcacgtacccctctgatcatttccggacagagcggtaagtcaaccaagttatacgaggcctgcgatatccttgctcagcagttagagcgcggtgaagccagccatgagatgaccaagatggcagccatcatgggtgaagaagttatcgagacaggtgacttcgttgtaaatgaaaaagataagatcgtaaaccttacagagcagggcgttcataaggttgagaaatttttccatattgaaaacctggcagatccggagaatctggagatccagcataatattacacttgcacttcgcgcccataacctgatgcataaggatcaggattatgtagttaaagatgatgaaatccttattgttgatgaatttaccggacgtatcatgccgggacgccgttactcagatggtcttcatcaggcaatcgaagcgaaagagcatgttaagatcaaacgtgagagcaagactctggcaaccatcactttccagaacttctttaataaatatgataagaagggcggtatgaccggtacagctgtcacagaggagaaagaattccgtgatatctatgcaatggacgttgtagagatcccgactaacagaccggttatccgagttgaccatgaagatgctgtttatatgacaaagaaagagaaattcaacgcagttgtcaatgctgtagtggaagctcatgcgaaacagcagcctgtactggtcggtaccattacgattgaaacttccgagcttctcagccgtatgctgaagagacagggaatcaaacataatgtattgaatgccaagttccatgaacttgaggcagagattgtctcacaggcaggtcaggcaggagcagttacgatcgccactaacatggctggtcgtggtacagatatcaagctggatgatgtggcaagaaatgcaggtggtctgatgatcatcggtacagaacgtcatgagtccagacgtattgataatcagcttcgcggacgttccggacgtcagggagatccgggtgaatcccgtttctatatttccctggaagatgacctgatgcgtctgttcggttctgagagactgatgaagatctttacatctcttggtgttgcagagaatgaacagattgagcacaagatgctttccaatgcaattgagaaagctcaggagaagattgagtttaacaactttggtatccgtaagaatcttcttgattatgaccaggtaaacaatgaacagcgtgagatcatctacaaagaacgtcgtcaggttctcgacggtgagaatatgcgcgaagcaatctataagatgatccaggatacagtggatacttatgttgatatgtgtttctctgatgatgtagattctgaagagtgggatctgaatgaatttaacggtgttcttactccgatcattccgatcagaccgcttacagctgagagtgtaaaaggcaagaaacgcgatgagatcagacatgaactgaaagaagaggcagtgaagctctatgaagaaaaagaagcagagttcccggaaccggagcagcttcgtgaattagagcgagttgtacttctgaaatgcattgacagcaagtggatggatcacattgatgatatggaaatccttcgtcagggtatcggacttgctgcttatggacagagagatccggttgttgaatataaaatgagtgcatttgatatgttcaacgaaatgatcacatccattcaggaagatactcttcgtatgctgtaccatgtacatgtagagcagaagatcgagcgtgaacaggtagctaaagttaccggaacaaacaaggatgacagtgccggtcctaagaaaccggttcagagaaaagaaatcaaagtatatccgaacgatccctgcccatgtggaagcggtaagaaatacaaacagtgctgtggacgtaagaataaggtctgactcgtttatctcagttgagaagactcccatttctgtatgtggtgagttcattactacagagcgggcagtaatgattttgtaaacagaacattgtgagcagatcatgtctgctgcaaaataaaagggctgaatcatgaggcccttttatcgtgcgcaaaaacacgttagcgcgttgaattggcagattgtgaatatctgtctgaactgttcagtacatccacagctatgtgattatgattgatgaacagtcacataacaattccataaagggggaaaaacagtatgaaaagagagtctttcggctcacgccttggttttatcctggtgtcagcaggatgtgccatcggtattggaaacgtgtggaagtttccgtatatctgcggggcatatggaggcgcggcctttatcctgatctacttatgttttctggttattctcggtattccggttctggtagcagaatttgcggtaggacggggaagccacacaagtgttgcgaaatgttttgacaaactggcacctgcaggaagcggctggaagccattgaaatttattggtattattggatgttatatgctgatgatgttttacacaacagtaggaggatggatgatctactattgtgtgaagagtctgcggggagatttcgttggagcgactccggaagcagtaacacagtctttttccgatatgctgggaaatgcaccgacgatgatgttatggatggtaatcatctgtctgatcggatttgcagtctgtttcatgggattgcagaatggtattgaaaaaatctccaaagtaatgatgagtgcactgcttatcattatggtgattcttgcggttcattcagtaatgatggaaggcgcgggagaaggaatccgcttctatctgattcctgattttcagaaaattaaggaagcaggagttggtaatgtagtatttgcggcattgagtcagtcattctttacattatccattggtattggtgccatgctgatcttcggaagttatctggacaaatccagaagccttaccggagaggcggtaagcatcaccgtactcgatacttttgttgcgctgacagcaggatttatcattattccggcatgcttctcctatggaattcagccggatgcaggtccaagccttatctttatcactctgcccaatatttttgcaaagatgagcggaggggctttgtggggaagtctgttcttcctgtttctgacatttgctgcggtttcaacgatcattgctgtatttgagaacctgatcgtgtttaatatggaactgtttggctggaaccgtaaaaagagtgttgttgtctgcgcagttcttgttgtgatcttaagcattccatgtgtgcttggattcaatgtactttccggattccagccattcggagatggaagcaacatcatggatctggaagactttattgtttctaataaccttcttcctcttggaagtcttggttaccttctgttttgtaccagaaagaacggatggggatgggacaatttcattgcagaggtgaatgccggtacaggcatgaaattcccgaaatgtctgaaaaattatgttgcctatggaattccggcgattatcattgtgatctatctgaaaggttactatgataaatttgcaggtctgggaacagcagcactggccggatggatgatcgtggcactggtactgctgggattcgtattctactgtgcgacagcgaagaagaaagtgaaataataagcagagtgtgaatatctgcacgacctgagaacaataaaagatgtaattatgtctgagaggaaacagtctttcagacatggttacatcttttttgtgttatggaattgttgtgtaaaagtagtggatgcattattttagaggattgctataatgaggcagttcttcgctgggggtggttttgaactgtttacggtatgcccgggaaaaagtgctgtattctgtgaacccgctttcctgtgctgcttttgtcacaggcattccatttgagatcagagtacgtgccataagaagccgcttgtttacaatataattatgaagggtatagccggtttcttgtttgaacttccgcatcagatggtacttgcttacataatatctggcagaaagcgtttctacagacagatcttctttcagattgtggttgatatactgaaggatactggcaatctgcgagtcaaaggtgtaggattttttatcaaaaatgtactgcttttccagaaagatacggttcagataaaccataaattgaagaaaaagtgactgtgtcaggatttcctttccatattcatcggattttgcggaattttccagttcaaacaggatgtctttcatcttttcctgaagagcagaattcagacgtaccagattatagcttcggtcatttgctttctggaagcatttcagcagttcctgccagggaatatcgttttggatccagagaataaaacgttcatatggaacagatgaatcaatctccgggcggtggatggcatggcggtttaccagaagaatgtcccatggtttcagttgataagcttttccttctatatgataagcagccttgccggagatgaagataactaccttgtgaaaatcatgataatggtaagagaattcctttctggtctggtctttaagatgaaaaagtcggaattgttcgttcaggtatcctgttttttctgtctgatagaactgttctgataataacatatctgcctccgatatctgcaatgattatttaatcgaatcaagcaagtcccctgtggagattgtgaaaagaaataagcagtggaaagcaataagcggagggaaaagtttgattcatggtataatcatatcatttaatgcgcaaatgtacaattattactaagaatgtaacaaatagtaacgaatatattttataatttctgagaaaatatgctacaaagatattgacattattacacgataatagtatcatacaattacaaagtaatcgtaaaaactttgtaactatttcgaaatagggtaaagaaatagaaaactgaacagagaggagtgatgttgctgtaaggctgttatatcagagaactgatataatggtcttttttgtaatacctacagagcattttttgcaatgttttaagcattttactctatatacatggtaaaaacaataaaatataatgaatataaagtcaggatgtgatatgagaaaattacctgacacaaaatttaaccgaatcaagtaagtcccctgcggaggttgcgaagagcaataagcagtgggtggggactcagacaagtggcgaagtgagttgggaagattgcccgacaattgattatcggtgcagatacaaaagcgggaagtatccgggattataaatcagaaggagagatatggttatggcaaatacaattattatgagtaaatatcagggacttggaaacgattatctgattcttgatccgaagaaaaatcaggtacagcttcagggaaagaagattgcacttctctgccagagaggatttgggcttggtgctgacggtgtgctctatggaccggtagaaattgatgggaaattgggtgtgcgtatttttaatgcagacggaagtgaatctgccatcagtggaaacggcgtgcgtatttttgccaaatatctgatggacaatggatatattactgagaaaaaatttgacattgaagctatgtcaggcacgattcatgtggaatgcctgaacagccgggcaacggaatttaaagtaaacataggaaaaccatcttttatctccagcgatatccctgtttccggtgaagttcgtgaagtaattaaggagaatttcgtattccatggaaaagaatacaaggctacctgcctgacagttggtaatccacactgcattatttttacagacaatgtaagtgcagaagctgtaaagaatctgggaccttatgtggaaaatgcagatgaatttccggagagaatgaacctgcagatctgccgtcaggtcgacaagggaaatctggagattgaaatctgggaaagaggctccggatatacaaaggcttccggaacaggaagctgtgcggcggcagcggcagcctataagctggggctggtagaatcccgtattaatgtaaatcagccaggcggaatgatacagatcgatatggaagaggacggaaccatctatatgacaggaacagtgggatatattgcagatataagtgttgcagagagcttcttctcataaattacacagactttatgcgtaattcagtgtaaagtatgattacccacagtgtgaaatgattgttatgataaatgatcatttcacgctgtgggtaattctttgtttgtaatttgcttaaagatatggtattattttaaacgaattatttatcaggactgctataatctatagcaattcagtcggttatccacagggagtccgacagagaatatttataataagaaagtgggtgaagctgtggttgaattagaccagttcaagagcattcttgcgacttatacagaaccattagtggaagtgagggattcactttgacctggctaacaaagagcagaaggtcgaagaattagagcgcgaaatggaagcgcctgatttctgggatgatgcagaagtttcccagaagaaaatgaaagaattaaaagacatgaaagatgacatggagacctatcagaatctggttacacagatggaagatatggaaaccatgatcgagatgggatatgaggagaacgatcctgcactgattcctgagattcaggaaatgctggatgagtttcagaaggattttgacaatatccgtatcaagacacttctttccggagaatatgacagtgagaatgctatcattaagctgaatgcaggtgcaggcggaacagaggcctgtgactggtgcggtatgctttaccgtatgtacagccgctgggcagataagaaaggatttaccctggaagtgttggattatctggacggcgatgaggcaggtatcaaatcggttactttccaggtaaacggaacaaatgcttacggttatctgaaatcagagaagggagttcaccgtctggtgcgtatttctcctttcaatgcagcaggtaagcgacagacatcttttgtatcctgtgatgttatgccggatatcaagaaggatctggatgtagagatcaatgacgatgagatccgtattgacacttatcgaagcagtggtgccggcggtcagcatatcaacaagacatcatctgccatccgtatcacacattatcctaccggaatcgtggtacagtgtcagaatgaacgttctcagcacatgaataaagataaagccatgcagatgctgaaagccaagctgtatcttctcaaacagcaggaggcagaggaaaaactctccggtatccgcggtgaggtgacagatatcggatggggaaatcagatccgttcttatgttatgcagccatataccatggtaaaggatcatcgtacaaacgaggagaccggaaatgtggatgcagtacttgacggaggaattgatattttcatcaatgcatatctgaaatggatcgcactgaagaaataaaagaataaaaaaggctgtctgaaatcaggacagcctttttcgtgttgaggtataatgattttacacaatgattcagcagaatatatttcttgcgtattttggtgtggtgtgataatatatccagtgtgtaaaaacaaatgtctttaaagaacggacaggtaaattgatatgcagaaaccagtaacagagaaaaagaaatattttgtagtgagggaacgtgcggttccggaagtcctgctgaaggttgtggaggcaaagaagcttctggactctggtaaagtggacactgtacaggatgcagcagagcgcacaggaatcagcagaagttctttctacaaatacaaagatgatatttttccatttcatgaagagacaaggggaaagacgatcacctttattatccagatggatgatgaacctgggcttttgtcggttgtcctgcagacgattgcacggtttcatggaaacattctcaccattcatcagagtattcctatcaatggggttgccacacttactctgagtgtggacattcttccgggcgagggggatgcagaagcaatggtagagacgattgaacagaatgaaggaattcattatctgaaaatattaggcagggagtaaaagaaaatgatcaatgtagcaattttaggatatggcacagttggaagcggcgtatttgaagtattaaatgaaaataaagagagcatttccagacgtgcgggacaggaacttcatgtaaaatatgttctggatcttcgtgattttccgggacagccggtagagaaggttctggtccatgattatgaacagatcgtcagtgatccggaagtagatattgtagtagaggttatgggcggtgtggagcctgcttatacttttgtaaagaaggcacttctggcaggaaaaaatgtctgcacttccaataaggctctggttgcaaagcatggccgcgagctgatggatattgcaaaggaaaagagcattaacttcttatttgaagcaagctgtggcggcggaatcccgatcattcgtgtcatcaattcttcccttacaggagatgagattgacgaagtgacaggtatcctgaacggaactaccaactacatgctttataagatgagcacagaaggctgtgaatttgacactgtattaaaggaagcacagcagaagggttatgcagaggcagatcctaccgctgacgtggaaggatatgatgcatgccgtaagatcgcaatcctttcctctcttgcttatgagagatattttgattttgaagatatttatacagagggaattacaaagatcacacctgaagatatggagtatgctgcgaagcttggcagaaccatcaaacttcttggaaccagccgcagactggcagacggaacctgttatgcaatggtagcaccgtttatgctcggccagaacagccctctttacagtgtaaatgatgtgtttaatgcagtatttgtacatggaaatatgcttggagatgccatgttctatggaagcggtgcaggtaaactgcctacagcaagtgctgtagttggtgatattgtggatgccgcaaaacatctccatgttaatattgtgacaaactggaacagcactccggcagtactgaaaccactggatgaagtgacaggaagattttttgtgagaatcaaaaaagaagcagcagaagaagcgaagaaggtatttggtgatgttgagatcatcagcctaggacagcttccacaggaatgtgcatttatcactgatgaaatgacacagggagcatttgaagagaaactggctcagatcggagatcaggtacttgcaaagattcgagttaaagattgataaactgacagatttcgtgtatcatatagtgtgcctgataaggtggacactgatacaatacttcagataaatatttgtacagtgattactgtaaacagaacaggaaagggaagatatgagaatcttctctttcctgtaaacttattatggaggaagtaaaacaatgttgattgtcaagaaatttggcggtacatcggttgcaaataaagaacgtatctttaatgttgccaaccgctgtatagaagagtacagaaaaggaaatgacgtggttgtcgttctgtccgcaatggggaaatatacggatgaactgatcactatggcaagggatgtcaatgagaaaccgccgaaaagagagatggatatgctctttaccatcggagaacagatgtctgttgcactgatggcaatggcgatggataaactgggagttcctgcggtttccctgaatgcttttcaggtttccatgcatacgacaagcagtcatggaaatgcacgtttaaaaagaattgatacagagcgtatcagaagagagctggacagcaaaaagattgtaatagttaccggctttcagggagttgacaagtatgatgattatacgactcttggaagaggcggttctgacacaacagcggttgctcttgcggctgctcttcatgcagatgcctgtgaaatctatacagatgtagatggtgtttacacagcagatccgcgtaaggttccgaaagcaagaaagctcaaagagatcacttacgatgaaatgcttgaccttgcgactctcggggcaggtgtgcttcacaaccgttctgtggagatggcgaagaaatatggcgtgccgcttgtggtacgttcaagtttaaacaacagtgaaggaactgtggtaaaggaggaagttacagtggagagaatgttgatcagcggtgttgcgctggatacagatgcagtgagaattgcggtaatcggattaaaggatgagccgggtgtagcttttaaattatttgatacccttgcgaagaagaatattaatgtagatgtgatcctgcagtctatcggacgtgcgggcagaaaggacatttccttcacagtcgatggaaatgatctggatgatgcagttgcagttctggatgcaaatcaggcaagacttggatttgcagagcttcattctgagagaaatattgcgaagctttccatcgtaggtgcaggaatgatgagtaatcccggagtagctgcaaagatgtttgagagcctctataatgagggcgtaaacatcaacatgatttctacatccgagattcgtgtgacagttctgatcaatgaaaaggacggcgtgcgcgcaatgaatgcagtacatgatgcctttggtctggcagactgatttaggagaattacatgacatcgagacgtgaattaaaaaactatgcgaagcaggccatgtcaggaaaatatgggatattgattctgtcatttgttgcagttcaggcactggctctgatcagcagcatgatatcctcggctttatttccgggagaggaaacaattgatattgtgttgtcgtatgcatttacatttattctgactctgctgatcaatgtggtagcggcaggtatgaattatatgtatctgaatattgccagagggaaagcatattcattgaatgagctgttttatttttacagacatcacccggacagagtgatcgttgccggattttttatggcagtactgaatctgcttaccatgctgccctatacgatttacagtaatgcgaatcttccgggtgaagatgcttctgtggaggtgctgatcacctggctgtatacaggtgttgttctgatgatcgttggaatgattgtttatcagattctggttattcctctggagatgacttattatattctggcagataagccggaattgaaaagtacagaggctatgaaagagagtctggagatgatgcatggaaacttcggaagatatctgatgctgaagataagctttatcccattgatgtttctttctgtttttacattctatattgcactcttgtggatatttccatatatggccatgacagaagtaatgttctatcgtgatctgacaggggagcttaaagtgcagaaagaggaagaagaacgtgtggcacgagactatgtgaatcccatgtttgacagctattcacagaacgaacagccacaggaagatcagacgcatccgcagcagttctggagtgtgacaggtgattcatcagtggcttcggatgagaacaaagaagtgcagaataatgcagcaagtgagaatacccaggatagtttgtatggttctgttgaaaataatagaacgacacaggataacccatatgattcttcagagagtaaagaagtacaggacagcctgcagagtcagacaattccggaagaggaagaagataacgaaccaaaaccatgggatgaatacttcaatagcttgaaataaaatcataatatgaaagacctttaactgacacaatgtaaaaatgttgataaaggtcttttttatttttattaatttggttttactgaattttctcatttataatggtggaaaaagcttatacgtaaatggtataataggaataattgctggtagcataaatatatttgaggaaggtttttacaattatgaacacaaatgaaatcagtggaaaacgtcagatggagtttctggcggagtttgattatatcagagaggcaggaactgtaggagaggaaaaagcagcaacgattattcaggaaacattgaatagttttggtgtggagaaccatctggaagagttttgttttgaaacttttcaggtaaaaaaggcgaagcttacgataacggaaccatatgcaaaagaatacatcgtaaccggatatggaagatgtgccaatacagatgagaatggacggaatgaatcttttttgtatgtggagaatgctgatgagatcagcctcgcaaatgccagaggaaaaattgttatggtaaatgacccggtaagaaaggaactgtaccagaaactggtgaaagcaggtgtagccggttttatcagtattgccggttccccattggacgagggcgtagatttgacaccgcgtgcatacagcttaccgaagaatctgccaggtgaagagaaaaaagcagccgggatagaagcggcaaattacgataacagaattccgggtgtaagcattcattataaagatgctgtcgaactagtgacaagaggggcagctaaggcttgcctgtccgtagaacaggagacagtgacacgtacatcccgaaatgtagtggcacgaatcaaaggaacagataaagcagaggagatcctgactcttactgcacactatgattcagtaccggagggacctggtgcttacgataatatgtccggtgccgcgatcatcatggaactttgcagatatttcaaagaacacagaccacgcagaacaatggaattcgtatggtttggtgcagaagagaaaggtctgcttggaagtcggaactatattaaagaacatgaaacagaacttccggctcatcgtttcaatatgaatgtagacctcgcaggacagcttgtgggcggaacggttgtaggagtgacaggtgatgcgtcaatctgcaatatgatcacatatatggctcatgagacaggaatcggcatgtctacaaagaatcagatctggggaagcgattctaacacctttgcgtggaaaggtattccggctatgacattaaacagggatggatttggcatgcatacacgtcatgataccattgcactgctgtcggactggtcgttggagagaagcgcgattttactggggcatatcgcggacagactgggaaacatcgaaatttttccgtttgaacggaaagtgccggaagagtttatcagacaactggatgaatattttggctaatgttattccggcagtatgtatcatattggcagaatcaatcccacacttgacaaatgaacgccagattgataccctatcacaagagcgttttttatgctatagaagaaaaacaatgtggatgcaagggtcgattacacgtatctgcattctgaaaagcaacaagaggagataaaaaattaatggatattattcaggtaatcacacaggaattgaaggtggagaaatggcaggtagaagccgcagtcaaattaattgacgaaggcaacaccatcccattcatttcccgatacagaaaagaagcaacaggttcccttaatgatgagcagcttcgtgcactctttgagagactgacgtatctgagaaatctggaagataagaagaatcaggtattaaagagcatcgaagaccagggcaagctgactgaggaactgaagaaacagattctggatgcccagacactggttgtagtagaggacttatacagaccatatcgcccgaaacgccgtacccgtgcgacaattgccaaagagaaagggctggaaccactggcagatatcattcttctgcagatgacagacaagccggtagaagaggaagccagggcatacgtctccgaagaaaagggtgttaagaatgttgcagaagcattgaacggagctaaagatattattgcagagcgtatttccgatgaagcagactatcgtatctacattcgtaacctgacaataaagaacggaagtatttcttccacagcaaagaatgcggaaactcagtctgtatatgagatgtattatgaattcgaggagccggtcaggaaactggcaggacaccgtattcttgcgttaaatcgtggtgagaaagagaaatttatcactgttaaagtaaatgcaccggaggaagacatccttcgttatttgaataagagagtgatcaaaaaagacaacccgaatacaactccgattctgaaagcagttgtagaagacagttacaaacgtctgatcggaccggctatcgaacgagaaatccgcagtgaccttactgataaggcagaagacggcgcgatccatgtattcggcaagaatctggaacagcttttgatgcagcctccaatcgcaggcaaagtcgtacttggatgggaccctgcgttccgtacaggctgtaagctggcagttgtagatgcaacaggtaaagttctggatacaacagttgtttatcccacagctccgactactgagaaaaagatccgtgctgccaaggatacagtggaaggtatgatcgaaaaatacggtgtatcccttatttcagtaggaaacggtacagcatgtcgtgaatccgagcaggtgatcgtagatatgctcaaagaaatcccggaaaaaaaggtacagtatgttatcacaaatgaggcaggagcatctgtgtattctgcaagcaaactggctacagaggaattcccgaactttgatgtaggacagagaagtgcggcttccattgcaagacgtgtacaggatccgcttgcagaactggttaagatcgatccgaaatctatcggtgtgggtcagtatcagcatgatatgaaccagaagaaactggatgaagcattaagcggcgttgtagaagacagtgtaaataaagttggtgtagatttaaatacagcatctgcatctctgcttgagtatatttctggtatcagcaaagcaattgccaaaaatatcgtagcttacagagaagagaacggtcagtttacagacagaaaagaacttctcaaagtagcgaaattaggaccgaaggcatttgaacagtgtgcaggtttcatgcgtatttccggtggaaagaatcctctggatgcaacaagtgtacatcctgagagctatgaagcagcatctgcacttctttcaaaacttggatataagccaaatgatgttgtggcaggaaatctccttggactttccctgcaggtaaaagactataagaagatggcagcagaactgggaatcggtgagatcacacttcgtgatattgtaaaggaactggagaaaccggcccgtgatcctcgtgatgacatgccgaaaccgatccttcgttcagacgttcttgaaatgaaagatctgaaagaaggaatggtgctaaagggaactgtccgtaatgttattgatttcggtgcatttgtagatatcggtgtacatcaggacggtctggtgcacatttccgagatgacagagagatttatcaaacatcctctggaagcggtgagtgtaggggatatcgtagatgtaagagtaatcggagttgatatgaagaaaaaacgtatcagcttatccatgaaaggattaaataaataacatcaataaaacagggattaccactgcagaccggatatctgcaggagtgatccctgtttttttggggtactgctgtctgcagtaacagttattctgtttcccggtgtgatgtgaggtgttcttcaaggctgcgtgctgcaatgctctgtggcctttttacattgcggatcagacagatctttcgttcaggaagaggctcttcaatgggaatctggacgattttcccctgagcaatatgttcagcagcaagctcttcagggaagaatccgattcccaggttgtgctgcaccatagggaagatctggtcagtagttgccacttccatatcaggtgagaagggaaggttatggcgcataaaatactgtgtatataattctcttgtactgcttccgggagcaatcccgatcagagggatatcctgcagatcctgaagacagtgtttgttggaagctgtttccgcatattcctctccgcctataaggatctcgcggaaagaatagaggggaattctctgaagcggttttttcagggcgacaggtgtggtaactactgcaaagtctaccagaccgttttccagtgcctgaactgcctgtggtgtggaatgattagaaatcctcagctttacatgtggataacggtgatgaaagacttccagttcgttcagcaagaataaacgcagtgcgatttcactggcaccaatatttacaagtccgctttccagacctttatctttgagaagttcattttctcctgatacaagctgttctattgcaattgatacatgttcaaaaagtctttctccttcaatggtcagctgtactccgcgattggaacggataaaaagtttacatcccagttcattctccagaatgttcatacaccgggtaatgttaggctgattgtttcccataacgtcggctgctttggaaaaactcttatactgggcaacatagtaaaaaatacgataataatcaagaatcatgatacagtcggctccttatgctatataaaaatagaatatctgatatagaaaaataacgtttgtatatcaatgtgtgaatcagtataatacgactgggtcaaaaaatcaatataaaagtcctgacaataggacggagaccaaaagggaagggagattaccgaatatgacaacagcaaataagacaattaagattaatgacgtagaggcagcaaagaaactggtctgtgcggcagtcagatgtccatttgatattgacattgtatctaaaggaaaaatttttattgatgccaaatctattctcggagtattaagccttgatgtggaagaacctctggaacttaaatatgatggttatgatgaggattttgaatcagtgatcgcaggtctggcatgttaagattaaagaaaggaattcgcaggtgcagatgacatctacaaatcttctatatatttatgtgattatcattaatgtagtcacattttttatctatggcttggataaaagcagggcaaaagccggacagtggcgcataccggaagcgcagctgatatttctggcggtgatcggagggtcagtgggagctctggccggtatgaaggtatttcatcataaaacaagaaagccgaaatttaagacaggagttccggcgatactgattattcaactaattatttattttctgttttcgggaaatgaggggattattctgcgcttatagcaatccttataaataatgcatattgattttagctcatcagagcgtgaaatcctgtgtcagtaaagcggatatattgtccgctttctttttttgcccgaataaaattgattgttacagagaatgaggtatgttatgctactcttatatgagaattgcgggatctgcaaagcagcggagtaattcgtagatatcaagtcaggggaaagacatcttttaaccctgatattatatgaaaagctgcctgttaaatgaaagaagggcagaaaaataatacatgacaaaaatataagagagcaggtgaaaaatattggaccaggaaattcaggaggcaaaaagtttatattacagctataagcagtatttttcagactatcttccggctttgacgaaactggggctgaaagtagtaatggcattgctggtatttgtgggcgggcgcaaagtgatccagtggtttgtttctttcataaagaagtccatggagcgtgcgtctgtagacaaaggtgtgatccagtttacagggtcgctgttgagaattgtactttacattttgctggtatttagcattgccactcattttggtgtaaaggaatcctctattgcagcactgcttggtactgccggtgtaacggtaggtcttgcattgcagggcggccttgcaaatatcgcaggcgggatcatgcttctgatcttcaaaccatttcaggtgggggattatatcattatcgcacagcagaatgggtgcgaaggaactgtatacaaaatagaaatctgttatacaactctgatttccatagataacaaacacattgtaatcccaaatggaacgctgtccggcagcattattacaaatgtaactgccagagatcttcgtaagctggagatcaaagtaggaatttcttatgattcagacattaagaaagcaaaagcaatcctggaagaaatccttcataatgatgaagatacgaaagacgaccagggaatggtggtgtttgtagatgagcttggagagagcgcagtggtcatgggcctgcgtgtgtgggtggctacggagaaatactggcctgccaggtggcggcttaatgaactgatcaaagaagcatttgatgcaaacggaattgaaatcccgtacaatcagttacaggttcatgtgaagaaacagatatgataacaacataagtcctctgaaccaactataaggtttagaggatttattgtttgtacagattatagccaaataataccaaacaagaataaataatccttgatcgatagtgatttataccaattttactgtcagatattggtataataccaccaaaataatataaaatacgacaaaataattgacaataggacaacagattgctatactggagtcaagttaaacaactaagtgtttttatgaagatgcaaaggcgcatgtaagtaaatggattgctgcacgatttttatacattgcaaagacgcaaaaatataaaaacactttttttgtacccaaaattaacttcgtgattgtaactaagtaacaatgtacagaaagaaaaggagagaaaactatgaaaatgtacaaaaaagttatggcagcagctcttgcaggagtaatgacagtttccatgtccgctacagcatttgcagcagatgatgacggctatattctcaaagccacaaatgaagattccaaatcatccgacaatgatctggtgatcgcaatcgaaggaagcgtaagttccatggacccggcaaacattccggatacaaacgcaatctctgctacacgtggtgtatacgagacactggtttcttttgatgagaaccaggaattaacaggcaaacttgctgaatcatgggaagtttccgatgactctcttacttatactttcaaacttcgtcagggcgttaaattccaggacggaacagacttcaatgcagcagcagttaaagcaaactacgatcgtgtagttaacaaagacaacaatcttcgtcagagaagaacatttattgtaactaacgaagacggatctgaaacacctcgtgtagacagcattgaaacaccggatgattacacactggttatcaaactgacacaggcatgggcaccatttatcaaccgtctgacacagttctgtatcatcagccctgcagctcttgaagagtatggcaatgatatcatgaaccatccatgcggaaccggcccatatgtatgtacagaatgggaagagggagaccacacaagctttaagcgcaatgatgattactggggagacaaaccgggtgttgacactgtaacaatcaaagaggttccggaagcaggtgcacgtacagctatgcttcagacaggtgaagcagatttcatctatcctacaccgtctgaccagattgaagcaatcaaaggaacagacgatgtaaacatccttacaacagactccaacatcatgagatatgtaactctgaacatggatctggaacagctttctgatgtaaaagtacgtcaggctatgaactatgcgatcgacaaagatgcatacatccagttaatgtattccggatacggaaaaccggctacatctgtagttccatctatcatcggtggatatgaagagcaggaagcttacgcatatgatgtagacaaagcaaaagaacttatgaaagaagctggatacgaagacggattcaaacttactctgtggggcgataacacaacacaggaaatcaaaggtatgacatttatttcccagcagcttgctcagatcggtatcgaagttgacgttcagccaatggagcctgcaactgtaagtgacaagatttatgttgacaaagaagatgctgagatcaatatgtggtatgtaaactggtctgcatctgacttcacaatggatggttctttacgttccctgctttacagcacaatgtgccctccgacaagtgcaaacacagcatacttcaatgatgctgattttgataaagatatggacgaaggtcttgcaacagctaacgaggaagagcaggctaaatactacggcgatgctcagaagatcgcatgggaagcatgcccatggttattccttggcaatgaccagatcatctattctacaaaatcttatctgtctggcgtatatgtatctccggacggagcatttaacttcgcaaatgcaactttagcacagtaagtaatttgtttgagaacaggctgcgaagaacataaatctggctgcctgatctgaaattgcagcaattccataaaaatactgccgatacagcagtgtgaatacaggacaaggatgttcaaaccggagaactgccataagattcactatggcagttctccgactataaagcatcaaatataaacaacaggtaagaaaatgataaggaggaaaaatatgggacgttatttaggtaaacgtttgataagcacgatcccgctgcttctggttatctcattcgtagtatttatgtttatccatatgattcccggtgatccggcaagactggtagccggtcaggatgcaacaaaggaagatgtggcagttgtacgtgaacagctgggactggatgagccactacttgtacagtatggcaaatatatgaaaggtctttttacaggagatctgggaagctctatcaaaaacggtaaaaccgtagtagagacaatcgcaccaagactgaaaccaactatcatgctgacattctcatccatgatatgggctgcgatcatcggtattgcaatcggtatcatcgctgccgtatttcatggcagaattcttgattatgtaggtatgatcatagcaatcgcaggtatatctgttccaagtttctggttaggtctggaattaatccagcttttctcagtaagcctgggatggcttccaaccagtggactggaaacctggaagagctatattcttccatcacttacaatgggagcaggaatcatggccgtacttgccagattttccagatcttccatgcttgagaccatgcgtgaggactatgtgcgtaccgcacgcgccaaaggtctttctgaatcactggttgttatgcgccatgcatttaagaactctctgatcgagatcgtaacagtagccggacttcagatcggtggtcttctttccggatctgttatggcagagacagtattctccattcctgggcttggacgtcttctggtagactccatccagatgagagattacaaagttgttcaggcattactgctgttctttgctacagaatatatcctgatcaacctgatcgtagatgttctttatggcgtgattaacccaagagtacgttatgagtagaggaggagagaagatggcagataagaacacaacatcaaatattaaccttgctgctgccgaagaactccctaaggcacagagcaagttcaaagaatttgtcaagaaattcatgaagagaaaaacagcagtgatttctctggcatttatagtttttattatcttaatggcaatcattggaccgtatgtagttccgtatgatccgcaggcaccggattacacagctatgatgcaggggccaagcgcagcccacatttggggaaccaatgaatacggacaggatgttttctcccgtctgatggttggtaccagactttctcttacatgcgcgctgacagcgacgatcattggtacggctatcggtgttgttctcggactgatcgcaggtttctacggcggaattatcgatgccctgattatgagatgctgtgatgtacttttcgctttccctgatatcctgctggctatcgcagttgttgccatcatcggacagggtatggtaaacgttatgatcgcagttgcggtatttacagtgccgtccttcgcacgaatcatacgaagcgcgacgatttccgtaaagcaggctccttatgtagaggttgcccgttccctgggatgttcaaacacaagaatcctgtttgtacatattttccctggtacgatccagtctatgatcgttaactttaccatgcgtgtaggtactgcaatccttgctgcatcatccttaagcttcctgggattcggtgcaaacgttacagagcctgactggggttccatgctttccacaggacgtaactatctgaatacagctcctcacatggtactgttccctggtattctgatcttccttacagttctggcattcaacctgctgggcgacggtctcagagataccctggatccaaagatgaactaggaggaagaaaccatggcagaaaaattattagaagtaaagaacctccgtacggagtttaaaagagataaaacatgggtgacagcagttaataatgtaagtttctccattcagccaggtgagattcttggtctggtaggagagtccggatgcggtaaatccgtaacctccctttccattatgaaacttctggcacgtaacagtaagatttccaacggtgagatcctgcttaatggcaaggatcttctcaaagaagataaaaaaggtatgagaaagatcagaggacgtgaagttgccatgatcttccaggagccgatgaactctctgaacccatgtatgagaattgagaaacagctgacagaagcaatcctgctccataacaatttctcaaaagaagaagcgcacaacagagcattcgaagtactgagatcagtaggtatccctgaaccggatatgacattaaagagttatccgcaccagctttcaggaggtatgtgtcagcgtgttatgatcgctatggcaatgtcctgtgagccggagcttctcatcgcagatgagccgactacagcccttgacgttaccattcaggcacagatcctggagctgatggaggacatcagggcaaagaagaatacaggcattctgatgattacacatgaccttggtgttgttgctgaaatgtgctccagagttgttgttatgtatgccggccgaatcgtagaagaagcacctgtgcaggaactttttgcagatccgaaacatccatatacacagggtctgatcggttctgtaccgaaacttggaagtggtgtggaatctcttccgtccattccgggaagcgtaccggatctgtccgtaatgccgaaaggatgtaagtttgcaccgagatgtaaatatgcaatggatatctgtcatcagcaggagccggagcttgcagatatcaacgaagcaggcaccagaaaatgcagatgtcatctgctcaacaaaaccggaaaggaggcgtaacctgtgagcgagccgttattatcagtaaagaatatgaagaaaacattccaggcaaacggaggaatgttcagcaaaaagaaatttgtccatgctgtaaatgatgtatcattcgatatctatccgggtgaaactttctctctggtaggtgagtccggatgcgggaaatctacgacaggtaaactgatcgatcatctgatcacaccggattccggtgagatctggtttgaaggaaaagaaatctccagactttccgagaaagaaatgcgtccgctgcgttctgatattcagatggttttccaggatccgtacggttccttgaatccgagaatgaaagttcaggatctcatcggtgagccacttctgatccacacaaacatgagcgcaggagagcgtcttaagaaagtacatgaacttctcggcactgtaggattaagcccgtctcatggagagcgttacccgcatgaattctccggtggtcagcgtcagcgtatcggaattgccagagcactgactgtacagccaaagcttatcatcgcagatgagccggtatctgcccttgatgtttctatccaggcgcaggtattaaatcttctgcaacagttacagaaagactttaatcttacctatctgttcatttcccatgacctgagtgtcgttgagatgatttcagacagaatcggtgttatgtatctgggtacgatcgtagagacagctccgaagaaagaactgtatgcaaacccgagacatccatatacaagagcacttctttccgcagttccgatcccggatccggaagtgaagaaagagcgtattaccttaaaaggtgatcttccaagtccgagtaatccgccaagtggatgcctgttccatacacgctgcccacattgtacagaaaaatgtaagacacaggtgccgacacctgttgaaattgcaccgggtcatattgtaaaatgtcattatccaaaacttacagaataggaattccgaaataacaatattacacctgaagatgaacagtgaagaaaacaggattcactgagagatacaggtcatcatgaatggatgaggaaagaggggctatgtttactgaggaaagacaaagcgcaatagagaaatgtcttcgtgaaaacggaaaagtcaaggttaaggaattgagtgaaatgtttcaggtcacagaagactgtatccgaaaagatcttaagattcttgaaaacgccggtaagttaaagagaacctacggcggcgcaatcctttcacaggattatccgctgaaaagagacgtagtagacagacgccagtttaaccttgacaaaaagagaacaattgcagccaaagcatttaaactgatcaagaataacgaaacgattttccttgatatttctaccacaaatattgaactggcaaagcttcttgccacgtcaaatatgcgtgtggtagtggtgagcaatatgatagatatcctgcagatccttgccacaaatccatccattaccgcaatcggtacagggggaacaatgtaccagacagtaaacggatttatgggagctgcaacgatagaagtgatcaaacagtatagctttgaccgtgcatttataggaagctgcggtgtggatatgactgattgtgcaattactacattgggggtagaggacggattgacaaagaaagcagccgtgcacagcagcagacataaatatgttgttatggaaagggataaattctatttcaatgattcctataaatatgcatacttcgatgatatcagcggaattgttacggatgaatttccagatgatacgatcgtgagtacactggagagagcaggggtaaaattgttctgatgcaggtaagtcttcgggggacttatctgatctgggtaaatcagtcagcagaaaggatgatctgtctggcttaaatgaaaaaagatggaggcaagtacgtgaaagaatatattttggaagcctgtgtagattctgtagaatctgctatggcagcggttgaaggaggcgcagacagactggaactttgcggtaacctgatcatcggcggaaccactccgggaccgtggctttttgatgaaataagaaagcgttcggatatcaggatccatgctctgatccgtccgcgttttggagatttctgctatacagatgcagaattttccatgataaagcatgcagtggaagatttcaggaaaatgggtgccgaaggtgttgtatttggggtgctgaagccggatggcacattaaacatggaacagatgaaagagctgatggaggcggcaggggatatgtcggtgactcttcacagagcttttgatgtatgtgtggatccaatagaaacaatggaacaggcaatctcactgggaatcaatacgatccttacttcaggtcagcgtaatgtatgtctgcagggggcagatctgctgaaggaactggtagagaagagtcagggacgtatcacgatccaggcaggaagcggcgtgggagcagaagtgatccgccagctttatccgcttacaggagtcagggcttatcatatgaccggaaagagagtcattgacagtgagatgcagtttcgcaaggatggagtcaatatgggacttccgatgctgagcgaatatgagatatggcgtacggatgtagataatatccgtgccgcaaagaaagttctggaggaattataatggcagaaccgagagtttttttaaaagagaacaggggccgaattgaagagaactacctggagcaggcaaaaaacctgccccgggtttttgcgcctgtagacgaaaaattacagaaatgtacagaggaagtggcacttgcatgtaaatatttatatgcatttatgccgtacagtgatattggcaattatccgtttgaagtatttctggactatgcggagaatggtgtgaggctctggaaagagaatccgcaggttgcagaccttcctgaagaaatcttcctgaattatgtgctgtttcacagagtaaatgaggaggagatcgcacagtgcagaacttatttccgcacagagatcggaagcagaatacagggaatgaacttcagagaagcagcgttagaagtgaattactggtgtgccgaagaagctacttatcattgtacagatgaccgtactttatctgcgatttctgtataccgcagaggaaatggcagatgtggtgaagagtccgtattcactgtaaatgcactgcgaagcgtaggcgtacctgcccgtcaggtatatgcgccgaagtggtctcactgcgatgacaatcacgcctgggtagagatctggtgtgacggcaaatggtacttcctcggagcctgtgagcccgaagaaatcctgaataaaggatggtttacaaacgcttcttccagagcaatgatgatccattcacgtgtgtttgacaccaaaatcccggaaggtgaggtgatcggcacagatggtatggtgaccatgctgaatgaattgaagaggtatgcagtaaccaaagaaattacagtaacagtaaaggatgcgcaggggttaccctcagagggagctgaggtttcctttgaggtgctgaactattcagagtatgcaccgatcgcagagaagaaaacagacagtaagggaaccgccagactgacaacaggacttgggagtctgcatatttccgcaagaatgtgttctgacggcgagtggttctatgcggaaacagttatgaacactgagaaagaagataactgtgaactttgtctggtatcgcaggataaaagaaatgacggcgaatcagaaaagtggacagcagcagatatatttgctcctcatgatgcacctgtaaacacagacatgccgactttagaacagaaggcgaagggaaataagcgtctgacagcagccaatgcacacagagagcagaaagtaagaaactggtcaaatccggaatgtgaacgtttcctggaaaaaaaggtaaacaggatagaagaagccattgctgcctcatacagagaagatctcctgagggttctcacagagaaagacagaactgactgtatcagtgacgttctggaggaacacctggagctggcaatcccatatcatggtatgatgaaaaaggatacctttgtatcttatgtgttaaatccaagagtagatgatgaagttcttcagaaatacagaagagagattaagaagcatttttccagaactgagaaacaggagctgagagatgatccttccagaatctggaatctgatcgagaaggcaattgtttccagaccggagaaagagcgttccagtgtgatcacaacaccggcaggatgcataaggacctgtacaggaagcttcctgtcaaagaaaatcctgtttgttgcaatagcgagaacccttggagtagcggcaagactgaatccacatgatcgttctatggaatatatgaaaaacggaagatttgttcctgtgcttgcaagaacagagaagaactgtactctgatcctgaaagcaggagagactgtacagtggaaatatttccagaactggagtattgcaaaactggagaatggaagatatacatcactgaaactgggagcagagaatttcgaagatcagatcctgaatctgccgttggaatccggaaactacaggattcttacttcaaacagacttccaaatggaaatatgtttgcaaatgaatatcattttgaaattcagcccggagagacaaaggagatcgagttggtactcagggaagcagatctggaggatatgctggagaatatttccatgccggaattcatgctgaaaactgaggatggtacagaagtgaaagcatctgatcttacagcagacggaaaacatatccttatgtttctggaagaagaaaaagagcctactgagcatatcttaaatgaaatgatggagcaggaagaggctttcgcaggatatgcagagcagattatttttgtagtgagaagcaaagaagcactggagacaccgacactgtccaaagcacttgcaaagttaaaaaatattcagatttattatgatgatttctcagagattatcaatactctgggaaggcgtatgtacgtagatccggacaaacttccgctgattattgtgacgaatggaaccctgaatgggatttatgcgaccagcggttacaatgtaggaaccggggatatgctgcttagattaatgtaacagagcgataaataagatgcccggagatgacacctgtgagcatcttctggtattgccggattacattattgtatagatgtaaaggattggatattgaatttgcatttacataaaggagataaaaatcatgtatcagtttaacagaaaagaatatgaagaacgtatgaaatggtatcaggatgcccgtttcggaatgtttatccactggggattatattctattcctgcaagaggagaatgggtacgcagtacagaggagatgcctgaggaagaataccttccgtttatgaaagaatttgatgccagagactataatccgaaacagtgggcaaaagaggcaaaggcagcaggtatgaaatatgtggttctgactgcaaaacaccatgatggtttctgtttatttgacagtaaatacacagattataaagttaccaatacacctgcaggaagagatctgatcaaagaatatgtggaagctcttcgcgaagaaggtctgaaagtcggtctgtatttcaccttacttgactggcatcatccggactatcctcattacggagaccgcatccatcctatgagaaaccatccggaatgcagtaatgaaaacagagatttttctcgttatatagagtatatgtacaatcaggtggaagaggtctgcacaaattatggaaaaatcgatattatgtggtttgacttttcctatgacgatatgcgaggcgagaaatggggagcaaccagactgatagatatggtccgcagattacagccgggaatcatcattgataaccgtctggaagtcagcggtgagggaagaggatctctgtatgaatgcgatccgacaccgtatcatggcgattttataagcccggaacagatcatcccgccggaaggaatctgcgacaaagaagggaatccgatggtatgggaagcatgcttcactatgaacaataactggggctactgcgcaaatgaccactattacaaacctgcttccatgctgatcaagaagctggtagagtgtgtttccaaaggtggaaatatgatcctgaatgtaggacctgatgcgaaaggtaaattcccgaaagaatcctccgcgatcctggcggaaatcggacgctggatggataagaaccatgacagtatctatggatgcgctccggcagcagatatcccgaaaccggattacggacgtatcaccagaaatggaaacaagtattatgtccatatttatgagaatacattaggaccactgccgctgatcggctttgacaagaataagattgtaaaagtacgtgccctggatgacggacatgaagtgccgatttctactttatgggtgcacagcgattatccggatatcgcatttgttgaccttggtccggatcctgtactgccggatcctgtagactatgtgctggaagtggagatggctgaataaagatatagaatacaaaaaagctgccggatggcagctttttttacgttccttaaccgaactgaggcacaggtgtccgtctgacttaacaacggtttctcttgtttacgaaataattcagaatcccgccgcctatgataataacaagggcaacagcaacaacacgtttcgctgcttcctgcggcatctggcttttggaaccgatggaatcggaatagaaagtcagggtataattgatctcatgaggggtgcccatggcggtagtgtctgcgattaccggcatgctctcatccataatggtaaccgggatctggaattcagaattcgttccttcctcattgacagggagatattttttaccgtcaacgatcatgtagtcataattagaactgctccactggatatcggcagttacttcgccgtttttcacagtgatcaaagtcggtgaagtgacactggctttgccgcttccgccttccagctctacctggatggaatactccccatcttctttatcaagagtgaaagcctgtgcagcaggaacagaagtccatactgacagacagcagattaaagctgccagaactgcaaaaatctttctcatatttctttcctcacttaaattcgataattttcatcatcccacaattgaaattaattgtcaatactttgttgaaaaagttatcctgttttagtataataaaagatactgtccgcacgcaacatcattgagaacgtagtgaacagtgagcacaataaatgaatatctgtgaattgctttgctgcgaagcagctcatgcaattctgatatcataaaaatgtatatgtaaatcacaggaggatatggtaatgagaggaattttatacggagtaggagttggccccggagatccggaacttatgacattaaaggcagtgcgcctgatcaaagagaatgatattattgcagtaccgggcgcagaggtgcgtgaaacagttgcatataagatcgcagtacaggcagtacctgagcttgcagacaaagaactcctgccaatctatatgccaatgacacacgataaggcagaactggaactgaaccatgaaaaaggagccaaggcgctggaagcagcacttgatacaggtaagaatgtagtatttctgacacttggagatccgactatctattcaacattttcatatgtgcagaagagagtagaagaggatggatatgagacaagactggtaagcggtatcacttccttctgtgcaacagcagcacgcctgaatatcccgcttacagagtggaaccagcctcttcatgtacagcctgcagttcaccgccttgacagtgaactggatcagccgggaacctatgtgcttatgaaatccggcaaaaagatgaatcaggtaaaggaaattctggcaaaaagcggacgcaatatccgtatggtggagaactgtggaatgccggatgagcatatttacaacagtgtagaagaaattccggatgatgcaggctattattctctgatcattgcaaaggaacaggatggaggattatgatcgagaccagagatctgacaaaaacctttgacaattttacagctgtggattccctgaacctgaaaattgaaaaaggggaattttttggccttctcggaccaaacggagcaggcaagacaacgaccatcagcctgctgtcaacccttcttcttcccacaaagggagaaatccttatagacggtcagcagcttacaagacaacgtcccgatctgaaaagaaaaatcagtgtgatcacccaggaatattccatgcgtcaggatatgaatatggatgagatcatggaatatcagggccgcctctactttatgcccagaaagcagataaaagaaaggacagaggaacttctggagttctgtgacctgctgaaattccgcaagcgtacagtacgtaagctttcaggtggaatgaagcgtaagctgatggtctgtcgggcactcctgacagatccggagatattgcttttggatgaacccacagcaggaatggatgctctttccaggagacagatgtggaatcttctgcgtaagcttaatgagaaaaaactgacgatcctgctgactactcattatatggaagaagcacagagtctctgtaatcgtgtggcactgatggatcatggtaagctggaggaggtaagtactccgtcagcactgatcgagagtcttggtgcttatgcggtggacgagatgacagcggatggaacacagaatcactatttccatacacgacaggaagcaatccggtatctggaacagcttacaggacaggcgtctcttcgcgagacgacactggaagacgtctttgtagaaagagccgggaagcatttgatttcaaaatagcagttattaaccgaatcagggaaatcccctgcggaggttgcgaaaaaagttagaataatctggagaaaaatgtatgggaattataacaatattatgggagaagtgggtagaattccgccgggacttctataagatcacgctggcggcaatgatcgcaccgctaatgtatctgatcgtattcggaatgggaatccagaccacttctcatggacagccatacctgaattttctgattccgggtgtggtatcactgacaactatgaacggaagcttcaacgccattgcgcagaatctgaacgtgcagagactgtatgagaaagcttttgaccaggtgatgatctcccccacaccattatggcagtttattgccggacagatcatcgggggaagtctgcgcggtctgtatgcaggaggaatcatactgcttcttacagcacctattgagacaggactgatcttcaacggatggtcctttctggtgatgttcctgaacggagcagtattctcagccatcggcgtggtggtctcctttctggcaaaaaatcacgcagacgtgccgaggttttccaattatatcattatgcctatggcatatttgtgtaacacctttttctcaacagagaaacttccgggatttataggcaagtttgtatcagccttgccattatcccagaccagccatctgatgagaagcatttcatcaggtgaggcggtgaattacactggtattgggattctgcttctttatctgctggtgtttactgtagcagcatcatggtttatttataagaagaaaaatctgtaactgactgacaaggaggagcctgtgctcctccttgatctgtttaagtattatatatcaatgtgaatttttgtaaagagaaaacagggaaccatattggcagtatatccaattattgacttttatcctttggatgatatacttaaattatgtataataaacttgttagcacacgaacagttgattctggcatctgtccagttaaattttcacacagccataataacagaagaaagggcatacattatatgagtaagccaaagatattaatcgttgatgattcacaattaaacagagaaatcctttcctgtatgctggaagataaatataatatctgtgaagctgaaaatggaaagcaggcagttgaaatccttgaaagatgccataaggattttaagctggtgctccttgacctgatcatgccggtaatggatggttatcaggtacttgctgttatgaaggaaaagcaatggctggatatgctgcctgttatctgtatttcatcagagacttccgaagatagcatccgtcgggtttatgggctgggagcaagtgattacttcacacgtccctttgatacaatgacggtctttcatcgtgttgagagtacgattgagctgcatgataagatgacgggagacctgcaggatgcgatgaaaatgttatcatctatttttcaccggatactcaagattaatctctcgacagatacttatacagttataagaggaaaagacagtactgtttccatgcttccaagtctttctgaaagccttaaaatgatggctgattataagtatatttatgaagaggatcaggaagaatatttgaaattctgcagtatagataatctgagaagagaacttgcgaaaggcagagaacgcatttacctgaactacagaactctgataaaacaggagtaccgctgggtatgtatggaagtcatcagaagtgcagaatataaaccggatgaccagattgccatgatgtatatccgggatatcaatgatgaatatctgaaacagctggataagatcatacgtcatgcaaaagatgcgtttgcctcagttacagtaaatatttcggatggaagctgtattatggcaaacagcaggattgcttcactggagctgaaagatgtaaatgaaccactggattcttatattgagcggatcagtcagtctattccgcagagagaagtgagaactcagtacagaaaggtattttgtgtagataatctgagggagtgtctgacacagggaaaagatatgatccaatgggaatgtcctgtgtatgccgcaaaaggaatcagtctgaggatgatcagaaccacagttgagatggtccggaacgtttcttatgacaggctggaagcactgatctatttttctgatattacagagaactatttttcagagcagattccgcatatgctgtacagaaagaattttgacagaatagagattattgacgggcagagagactgtgtgagactggatcatccgggtatctgtgccatggagatggttctggcagaagagatcagttattccggttatgttactgaagttatgaagaaatttgttccggatgatgagaaatctgtatatgaaaaatgtgtgcgtcttgataccattcggaaagaactgcaggagaaagatagatattctttctctgttcatcagtttaataaaaaaggggagaaatgtttaaagaactatacatttttttacctcaataaattttttgacattattgtagctacagttgaggatattacggagaaatttgaacaggatattctgacgggcggatataacagacagggttttatccgtcatgtggaacggatcctgaaagaaagtgaagacagaaccggatatgcggttgtatttttcgatattaagaatttcaaggcagtcaatgaactttttggaacagaaatcggagatatgatgctgcgcaaagtgtacgaagatgtccggaaatcagagctgaagcctctggtatcggcacgtgaggacgcagatcattttatctgtctggtagaacgtaagaatctcaatctggatatgcttaccggaatgtgtcagaagaaacttacccggggaggaaaaacacttcatttgtctgtcaaatgtgggatttttatgcttgaaaagaaaaaaatgtctgtgaatggaatgattgacagggcaaagattgcccagagatatattacagatgagtttgtccagtcatataagatttatgattcttccatgaagaatacatatatagataaagcaacattagcaggtgaactggaggaagggattgagcagggacagttcaaagtatattttcagcctgttgtggatgcaatgaccggaaaaattgcatcagcagaatctctgatccggtggttccacccgaaaaagggatttatttcgccgggtgtatttattcctgcactggaggaaagcggacatatttccgaactggatctgtatgtgctggattcggttaatgaatttcagaagaaacgttatcagtccgataagatcacagttccggtatcaactaatctgtcatggatggatttctatgatgagacgatcatgaactggctggagaagaaatgtgcagatgcttccatgccgtccggtctgtgcagaatggagattacagaaacttcctatgctgccattgaggcagacagaaatgcaactctggaagcattaagagaagcagggattctgctactcctggatgattttggaagcggatattcttcctttggaatgctccagaattacaactttgatattatgaaaattgatatgagttttgtgcggcagatagaaaccaataccaaaacacgcagtattatccgcttcatcattgaaatggcacatactatggagataaagattatagcggaaggtgctgaaactaaagagcaggtcgagttcttaagagacaacggctgtgattatatccagggttattatttttacaaaccgatgccggaggaagagtttgtgaaactgctggatgccggcagataacagttacataaaatagtctcgcacaaactgtacaaactgcttcacatggggtttcagaatcctgtttttgctgtagactatatagaaactgcgcttatgggcagcttcctccagcggaaagacaagaatctgctttgtcttctgcaggtcattgacagagcgtgatgaaagaatagagattcccagaccattaacaatggactttttgatgctttccaggtcattcatgcgggcaatcacattcagattgcctgttgtgatgcctgtgcgctccagaaaaaggtccatttctttttttgtgccggagcccttttccctgaggataataggatctttcaggaaatcatgaaaaatagcgggtgtttctctgtccttgagtgcaagatagtgatctgttacaggagttgctatgaccagctcatcatggcagaaaggaataaatacgcagctctcatcacgtgtattctggcctaccagagccagatctacagttccgtccagcacccggctgatggattcagaactgtctgactgtatggagtgaaaataaacatcagggtgcgttttgccgaaagcagcaagcagttctggcaaaagataagaagaaggaatggtagatgcagccagatctatcatatgtttgtgggcacctgtaaaattctcaagcaggttatttctgatttccagcatacggactgcactgtcataaagctggtagcctttggctgtgatcgttgttttctttgtagtacggatgatcagtttcatatgcagttcatcttccagggaacgtatatgcgcactaatcgtaggctgtgtcagatagaggcggcgggccgcctctgagaagctgccgtagtccacgacagcgacgaatgcttctaattgtttaaattccattgtgaaactctccttttatagcaatgcagataatgcagctaaagcaatatccagttcctgttttgtattctcggatccgaaagaaaaccggagagtacctttcgggtatgttccaagggttttatgggcatttggtgcacagtgaaggccaactcttgtcataattccgtaagtactgtccagctcaaaggcggcctgagccatgtccatatgtaaggtctggacagatacaactgcacaacggttttcagtattttttttaccgataatacgcagaaattttttttcaggatccagattcaggataccatctataaagtattgtgtcagcattaattcatgttggcggatttcttccatggactgtttctccagatcacagagtgcggcatgaagtcccagaatcccaggtatattgggagttccgggctcgaaacgatcaggaagaaatgccggtacttcttcagaatgagaggcgcttcctgttccaccgctgataagaggctcaatctgcgctgccagtttattgcggatcagaaagccacctgttccctgtggccctctgagtcccttgtgacctgtaaatgccagtgcgtctatgtgacatttctccatatcaatgttaatggttcctgccgtctgtgcagtgtccagaataaaaagaagcccatgttctttgcagaaatctccgatttcctgtgctggcatgacagttccgcatacattagaagcatgaagacagaccacaagcttagtctcaggacgaaggagtgcggtcgctttatcaagcagaagactgccgtcagaagcgcatggaatcctgtcaaaagaaattccatgtttctccagctgtacaaggggacgcatcactgcattatgctccatggcagttacaagtacatgatcgccggggttcaaaagtcctttcagaagaacattcagacttgcagtgatattttctgtaaaaataacattcttaccctttccggaagtaaagtgaaagagcctcagaagctgttctcttgtttcaaaaatctgttcctccacagaataagctgcccggtatcctccccggttcacattcacagcagagcctgacaggtaatcataaactgcctgtgcaacagatggtgccttgggaaaagacgtactggcctgatccagatagattttattcataaataaatcctttcgtttgtcatgggcggaaacccactgcctttaggcggtgggaggagccttgtaaattgttatctattatccttgactctcaatatatttttgtatagttgctgatgacacttctccaatgctgcaagcaaaataaccatctgaccaaaatatttttttcttccaatattgttttgataagaccgaattatacttttgccataagtagtatgttgtttcctgttttacaattttaacaatgtcgcatactctatccgttgcatcataacttaacaaaaatgtatatggtctttgtctgtttccatagcaattatttcgtagccacgagtattagctatatcgagaatcttttgtttcacatcatcagcaatagagccttgtagtagttgtttgcggtatttggttacaagaactatatgtactttcagactgtattttcgtctgttatgacgataatatctattatccataaatcacctctgatagttattgacgttcactaaatattagtatacactattgctagtgaagtatcaatgagaggaataaattttatggaacagataactataactgcaaaagttcagatagttgcaactgatacagataaagttttgcttaataaaacaatgtctgtttattgtgatgcctgtaattatgtttcagattatgtattccgcacacatgacctaaagcagttctcactcaataaaattttgtactctactctaagagaaaagttcagtctcaaatcacaaatggcgcagtctgtttttaaaacggttatcgcaagatataagaccattcttgaaaatcagaatgaatggataaaaccatcttttaaaaaacctcagtacgacctggtttggaacagagattattctttaactcaaaactgcttttccgtcaatacgcttaatggtcgtgtgaaacttccttattttgctgagggtatgtctaagtattttaaccattctatttacaagtttggtactgccaaacttgtaaataaacatggtaaatactatctgcatataccagttacctatgaggttgaagaaagtaatatttctgatatttgtaatgttgtaggtattgacagaggtattaactttgttgttgcaacttatgacagtaaacataagtctggatttgttagtggtaaagctattaaacagaaacgggctaattattccaggcttcgtaaagaacttcaaatgcgacatacgccatcctcaaggcgaagactaaaagctatcggtcagcgagaaaaccgttggatgcaggatattaaccatcaggtatcgaaggcactcgccaccggtaatccaaagcatactctctttgtattagaagatttgactggtattcgcaatgttacagaacgtgtcaaaacaaaaaaacgctatgtttctgtatcatggtctttttatgaccttgagcagaagctgatttacaaagcgaagcagaatcaatcttctgtaataaaggtggatcctcgttataccagtcaatgctgtcctgcttgtggacatactgaaaagtctaatcgtaataagaaaatacatttgtttacttgcaaaaactgcggttatacgtctaatgatgaccgtattggagctatgaatctgtatcgtatgggaataaactatcttgctgatagccaagtacctgatacagttgtaacagagtaaactctgctacaaagggtgctgtcaaccacccaatgatgtaacgccactttaggcagcaatgcctattggggataaaaggtcggaggcgtaagccgttactacgactgggcagttacaagcccattacctttaggtgatgggtagttgacacagaagcggacttcccggagaaaacggaggaagtcgagcagattgttagagtagaaccgcagggctatgtgggaatttatcatgcggatgaagaataaaagtatcattcagttcatcctttgaataactgcgcgtcgcattctcgttattttccaatgaagagagtcagacgcgcaattttgtttcaatctggaaaaaactataccattcgcttgtctgcgaatccgattgcacgggtataaaagcctcagcgtagctcgctatgcctgcgtttttataataatataagaacggaagtttacttaaaaacatatatatggtataaacattttatagaaaaggatatctttaacacgattgtatgaatctataaaatatcgtaaaacaggaggcgtttaaatgatcagacttcaggatattgcagatatggcgggggtgagccggactacggtttccaatgtgatcaatggaaataccaagagagtgtctcaggaaaccatagataagattacccgcattctgaaagaacagaattatgttccacatatgggatctgtgatgttgtcaggtcatggctccagaatcatcggagtagtgcttggatttgccactgcccatggaatgcagtctctgcaggattcctttgtgggagaactgatcggaaccatacagacagaagcagaacggaaaggttatttcgtcatgcttatcggcggggaaaaaattgaagatgtagtagacatggcttccaggtggaatgttgagggtctgatcattctgggatatgatgaggaacgatacagacagctgtccagaaaactgaacaaaaagatgatattgatcgatgcatatccggaaggggaatacaccttccagaatgtaggagttgacgattattccggtggatatcaggttggagaatacctgtattcctgtggatatcacagggcattgtttatcgcagagacagataaggacagtgattcccgcagatggaacggatttaaacaggcaatggaaaagcagggcggtttctgcagcaaatcccgtctgatcgtagttccgggggagaagagacagcgccttagcaggtatgaagaactgcttccccgtttccttgaagtaaaggcattggcgttttcttcggattacggagcgattgaggctatgaactatttctttgatcatgggattaagattccggatcagatttccatagtaggttatgatgacagtatttatgcggagtttgtccgtcccaggctgactacagttcatcaggatatccaccagaagggcgtgatctccctgcgccgtctgcaccggatgatagagggagaaactttaaaagaaatgaatatcaagagcccggtgcggctgataaaaagagagtcggtgaaagaatagcaggctctcttttgcaatttacagaacttatctggttgagtttatagtgtaaaagtgtaccaaatattatacaatatgcataaaaatagataatgaattttgtgtgaaatttaagtttcccgagaaacctgttgatttttacagacagactgcgttatgataaagtcaccaagggaaaacagaggttgcgcagccttcgtagttaatgaaaattaaattatggaggagaaaaaatgtataaaaaaataataagcacattggtaattggtactttgcttgccggcacattaacaggatgcggtggttcatctgacgcaggatcttcagcgaaaagttcaggtaaaacagaactggaacttttttccacaaaacctgagaacaaggatacgattcagaaactggtagacaaatataatgaaagccatgacgatgtgacagtaaaggttactgctccgccggatgcaggaacagtattaaagaccagaatggcaaagaatgatatgcctgacatcgtagcaatgggcggcgataacaactacactgaggttgagggtgcaggtatgctgcttgacctgggtgatcaggattatatcaaggatgtacaggaagcctatattgacatggtttacgatgtaaataaggacaaagaagagacaatatatggtgttccatttgccacaaatgcttccggtgtcatctacaatacagagaaattcgaagagcttggactggaagttccgaagacctgggatgagtttatagatactcttcagaaaatcaaggatgcaggcgagcagccattactgatgacttataaagatgcatggacagcaaatgcaccatggaattccatagcagcagaccttgcaccggagagcttcgcagatgaccgcaaagcaggcaagacaacatttgtgggaactcatgaggagattacagagaaatatctgacacttcttgattatgcacaggatgatttcatgggacttagctatgatgacggaaacaagaaatttgccaacggtgacgctgtaatgatcatcaacggaaactgggcgatcagccagtaccgtaatgctaatccggatgtaaaaataaacatgtttgcactgccgtcttccaatgatgaatcccagaacaaggttacatcaggtgtggatgtgcttctgggcgtaagcaagagcagttctaatgtagacgcagccaaagatttcgtttcctttatgatggaaaaagaaaatgtacagacttatattgatgagcagttctcattctccgcattaaaggatgtagagcagagtgatgaagcagtatcaggtgtacaggaagatatcagcaatggtaaagttgccaactttgaagaccactattacccatcaggatttgatatgtctgcattgcttactgaacttagtttaaatcgtgcaaatggaatggatgataaggaaaacatcgaacagttcctgaaacagtgtgacgaaaaatatgatgttgcgaatgtagattaagtgaggggatgagcctatgaagaaagcagcgaatcgtaaaagacctgctgtcaataaagtttactatatttatgttggcattcttgcagtattatttttcatcttccatacaattcctttcctgaaaggtgtgttctacagctttactgactggagaggatacggagattggaatttcgtagggttgcgtaattacctgcatatgtttgtagatgcagatacaggaaatgcctacattttcacctttaaatttgctgtgatcactacgatcctggttaatgtgatcagtcttgtgctcgcatgcgcattaaatgcaaagattaaattcaaaaatacgattaaagcattttatttcctgccgtatatgctgggaagcctgatcgtgggattcatcttcaactatatttttgcaaacctgatcccggagcttggaaaaactctgggaatcgaggctctcagtgtgaatatcctgggtaccaacagtgcgatgtggggaatcattgcagtatctctgtggatcggatgtgcattcaatacactgatctatattgcaggactccagtctattgatacagatgtatatgaagctgctgatctggacggagctacaggattcaagcgattcagcaagattactttccctcttctggcaccgtcctttaccattaatatggtgctctctgccaaaggttacctgatggtttacgatcagatcatggccatgacagatggtggacctggaacagcaactacttccattgcagtcctgatttataagaaaggatttggtggaggacagttcgcctaccagtcagccaatgcagttgtgcttttcatcgtagttgtgctgatttctgtattccagctgcgtatacttgagaagagagaggagaagttaggatgaaacagggtgtagcgaaggtaaaagaacgttacaactggcctgtaacgattcttcttatcataggaattgtgctgatcattcttctgcctctgtatatggcactgatgatcgcaattaaggatccgtctgacatgaataacgtactggcactgcccagaaagctgcgtctgcagaacttcgcagatgcttgggtgatgaccgattttccgcggaaattttttaacactgcatttattacagtgatcaatctgttctttacattgatcacaaactcctttgcagcgtatgcaataaccagaaacaggaaaaagagcaaattcttttccattatgtactactactttatcagtgctatgtttatcccgttccaggtaatcatgcttccattggttgtacaggcaaatgcgttccatctggataatatttacggtattacttttctgtatgttatctttggtctgcccatgaataccttcctttatacaggtgcgatcaaggcgataccggaagcactggatgaagcagcaatgatcgatggtgccaatcccatccagattttcagccgggtcatttttccggtattaaaaccaactacagcaacagtagcaatcctttcctttatgtggacatggaacgacttcagtatgccactggtactcttaagtgatgagagccagcagaccttacagcttgcacagtatgtattcaagagccagttctctgtagactataatctggcatttgcctcttatctgcttgtactggcacctgtactgatcgtatatatcttctgccagaagtggatcatgaacggtgttgttgccggtgcagtaaaataacacatcaataaacttgagaaatacaaacaggaggcttacgtttatgaagaaaacctggtggaaagaaagtgttgtttatcagatatatcccaaaagctttaaagacagtaatggagacggaatcggggatatcagaggaattattgagaagcttgactatttgaaggagttaggtgtgaatgttctctggatttctcctatgcttgagtctccgcaggatgataatggctatgatatttctgattacagaaagatctacaaagactacggaaccatggaggattatgaaactctccttgcagaggcacacaaaagaggaatcaagattctcatggatctggttgtaaaccatacttccgatgagcattcctggttcgtcgagagccgtaaatccaaagacaatccttaccgcgactattatatctggagaaatccggtgaatggtaaggaaccaaataactggggcggagtatttggcggttcagcctgggaatatgacgcacagacagatatgtattatcttcatctgttctccaagaagcagccggatctgaactgggagaacgacaaggttcgtcgggaagtttatgatatgatgaacttctggtgtgaaaagggaatcgacggtttccgtatggatgttatcagcatgatctccaaagatcaggaatttcctgacggagagatgaataacggattgtatggtgatttcggtccgtacagtgttcatggtccaagaatccacgaattcctgcatgaaatgaatcaggaagttctttccaaatatgatgtgatgactgtgggggaaacctcaggagttaccattgaggaagcacagaaatacgcaggtgatgacagagaagaactgaatatggtattccagtttgagcatgtagaaatcggcggcggtgattatggcaagtggaccacagaacggtatgatttcaaagagttcaagaagatcatgatcaaatggcaggaagaactggcaggaaaagcatggaacagccttttccttggcaaccatgaccagccaagaagtgtatccagatttggaaatgacaatcctgcttaccgcgatatttcagccaagatgctggcgacctgtcttcatatgatgcagggaaccccctatgtttatcagggtgaagagcttggaatgactaacgtctatttcgacaagctggaggactaccgcgatatcgagagccttcattatttcactgagctgacagagacaggcagactgacaccggagtatatgatgaaatgcctgatgctcagaagccgcgataatgccagaacacctatgcagtgggacacttccgcaggtgcaggtttcactacaggggaaccatggatcaaggtaaatccaaattaccagcagatcaatgcagcagatcagttaaaagatccggactctgttttccattattatcagaagctgattcgtctgcgtaaagaaatggacatcattgtgtacggagaatttgaggctctgtaccgcgaccatgatcagatattcgcttacataagaaagcttggatcagagaagctgctcacggtatgcaatttcagtgcacaggaagcggaaatggaacttccggaaacattcgcagaagaagctcagtgcctgattacgaacatgggaagaaaagtatttgacaggaaaatcattctgaatccatatgaggcgtttgtgctttacaaaaaataaaatagtctgaaaaaaataccctttcgtatgacatgacgaaagggtatttttgcttttatttagaggagaatactgatagagtataaaaagtgcttgccagtatatatcttttcgctttaacttctcattttaatgtatacctatttatctgccccataatatctgtcatcgccgaagccaaggatcagcatgaagattggcggtaagaagataaggccaatggcgaatcctgtgcctctgccgaaggctcttgcaagcttaacactgtacataatgctgattatggcaagtatgattttgatcagcacgatgatcatggagatcattaaactgtcgtttgtttcaagagttccctgtaagcaggaagatacgattccaagaaccaatgtcagccagaaatatgcaggctgccatgcgattttataagaaatataatcgccatatattggaataatacttttccatccggcctcccctgctttggtaaagattctccagttggcaataatctgcagaagccaccatgcgaatgcaatcatcagatacataccacctaagaataccatgctgctgatagctataagtcccatttgtgttcccccatttctttctgtgagatatgatacatgtatcgttggtgtagaagcatagttgagaactatgtttgttctcctgaagtatttatgctaaatccattaaagcatattctcagtagttcgtcaattatcaaagaagattgtacataagcgaggtgaaaactatggcagcaatacttatgaactacaaaataccgggatattatatatttttcatttgtctggcagtgatttcctgtttttctaatcctggaatggttgtattagcgggctgtagggttgataatattgatcaggcagagtaaaattttatcaatgaagtgagtctcctgctttaatattacaaatattcgtctgacttatgaaaagtgcctgatgagatgaaaatcttctcagggatgggttgtgagaacagagaaaaaagaatggtttcggaaaaaataatgacaagttaaacaaaagccgtaaagtgggaatttccagctttgcggcttttgtggtatcatgaattgaaagacatctcaacaacttttccattggttaccttaatgcgcagacctaatccattcatgcttctcatggtagacatgaaagcggattttgagcaataatcgttgggagcttcacctccggaaaaatagtatttggtcttggaagtaagtttaaatgtatgttttccgtattttatatatgcttttttgttttggctgtttaatattccgtttttggaagtattaaatgacgcatacattgtcagagtgttccccttacatatagcctttcttgtgcctgacatatagtattttgtgccattggttgttattgttccgcctttttttccatttatgcaggtatcatagtaggttgtacctgactttccggtagctgcctgcacatttgagaatcccatgcagccggtaacgaggcagatggcaagtatcagtgttaacattttctggaacttctttgtccatgttttcatattgaaaacctcctttcgttttctggatttattataatagcctggaaaagcaaagtcaatagaggagcgtaatggaatagttgtattgacaatagatatctgtatgtagtataatcagacgcagataaaagaaaattcttcggggttgtggtgatcagcatcagctgagattccctaccggcggttatagtccgcgacccgcttcggcggctgatttggtgaaattccagaaccgacagtatagtctggatgagagaagaacacgcgatatttaccatacgtgctcattaccccggatatgatccggggttttttatatgttgaagaaaatcttcattatataaaaagcttgtggaattttcttttaacaggatatgagacatatccataaagaataatttcaaaggagagaaacagtatgagtgaacaggtattaagaaatggaaatgcgatggcaaggagtaagacgagaaccgttacacagatagccatgcttggcgctatcgcaggaattttaatgaatctggagtttccgcttcctttcctggcaccgactttttatcagctggatttttcagaaatcccggtactggttggttcattcgcaatgggaccgatcgcaggtgtactgatcgagctggtgaagattcttgtgcatctggtaacaaagggctctatgacagcaggtgtaggcgatgtggcaaacttcatctttggatgtacatttgcagttccggcaggtctgatctaccgctataaatctgttaagagcagaaaacatgcagtgatcggaatggcagttggaaccgtacttacagcagtagttgcatgctttatcaatgcattcgtgttacttccggcatacggaaaggcctttggaatgccggtagaagcatttattgaaatgggaagtgcagtacacagttctgtaaataatcttcttacatttgcagcaatgatcattttcccattcaacatattcaaatatgctctgacatccctgatcgtattcctgatttataagagaatccgcgtggtgctcaagggcgattgattttatatctgataaagaataaataaattggcagtacaataaataaaaaagaagaacagccgtatgatgaaaaatctgcggctgttcttctttttatgtgtaaaaaataattacggaaattgtcagacagacttaaaaaagatacgataatatggtaagataaaacagacgatataaacatcggaatgtgaggtttataaaatgaatgatacaggaatcagaccggaagttatagaagaaatccgaaaccttgcgcaaaaatatgatattgaaaaagtaattctttttggttcgagagcaagaggagatttcagaagaacaagtgatatagatattgcagtcacaggaggagattttgcaaggtttgcgttagatgtggatgaagagacaagtactcttctggagtatgatattgtaaatcttgatcgtgacatgcaggatgaattaagagaatctatagagaaggaagggaggattttgtatgagaaaatatgaaaacaatcggaaaattgcgttaggaattatagctgatgcaaaagaagagttttatcagatgttctgcgaactaaaaacagagatagaagaaaattggctgtaataatcagcgaaggtatagaaagcgaaaggaagtatccattatgggacagatacacaatattgaaaaactgacagattgtaaatttttaaatttgtatcatttaaatgcaacaagtgttcacaacactcctgtgtcatatttcgtggcatcacgtgcgaagagtattaacgaattaaagataaaaacaggtaaaaacactccggatggcgtgatcatttacagtctttatggggaaaagagagacagagttgtattagtacgtcagtacagatacgcaatcggcggatatatctacgaattcccggcaggtctggtcgaaccgaacgaagaattccatgagggtgcagtaagagaaatgtacgaggaaacaggactgaaattcacacctctgaaagtagatcctgcatttgagaaaccttatttcacaacggttggcatgacagatgaatcctgcgcaactgtttatggatatgcggaaggtgagatcagtaaagatgcacaggaagacacagaggaaattgaagttgtacttgctgacagagaagaagtaaagaggattctgcgtgaagaaaatgtagcgatcatgtgtgcatatcagcttatgcatttccttcgggatgaagaaccttttgcatttttgaaggaagaactttaaccaaatcaggcaagtagcgaagcggatgattttatctgcttgattaaggagaattaagggagaattaaaataatggcaaaatggcagagaagcttttttcagccggtgcttccgctgggagaagatggacggagagttacaggaagtaaagaacacattgcactttccagaatggcagcaggagagggaatggtccttctgaaaaatgagaaaaatacacttccgatccggagagggacgaaagtcgcattctttggtaagggtactgtagactacgtaaaaggcggcggaggaagtggcgatgtaactgtagaatatatccgtaatctttatgagggcatgaagattaaagaggatgagggaaaagtagaagttttcgataaacttgcgaaatattatgaaaaagatattcagaaacaatacgcagatggtgcagtaccaggtatgacagttgagccggagctcccggatgaacttctgaatgaagcgcgagaatatacagatactgcagtaattaccatttgccgtttttcaggcgaaggatgggacagaaaatgtgaagcagcacaggatggatacgttcttgacggagaggaaaaaagaaactccgagttgtcagcaaagatttttgaaaacggtgatttctgcctgacaaatgcagagaatgccatggtagagaaagtaaagaaagcattcccacatgtaatcgtagtgatgaatgttggcggtatcgtggacacgaaatggttcagagactgtgatgagatccagtcagtactgatggcatggcagggcggtatggaaggtggtcttgcaacagcagatatactttgtggtgatgttaatccatccggtaaattatccgatacttatgcaaaagatctggaagattatccatccacagcaaacttccatgagtctgcattttatgtagattacacagaagatatctatgtgggataccgttactttgaaacaattccgggtgcagcggaaagagtaaattatccgtttgggtttggactttcctatacagacttcgactggaagatgactggtgcttccgaagaaaacggtgtgatcacggttcttactgaagtaaccaatacaggaaaaacagcaggaaaagaagttatccagctttattacggagcaccacaggggaaacttggaaagcctgcgaaagtactgggggcattcaaaaagaccagtcttcttcagccgggtgaacgtcagatccttaccctgaaaattcctgtggatcagatggcatcctacgatgatctgggtaaagtatgcagatcagcctatgttctggaggcaggagaatatgcgatctatatcggtacaaatgtaagagatgcagcgaagatcgactttacatatgtagtaaaagaagacacagtaactgagcagttaagccggaaggcaacaccatatcatcttcagaaacgtatgcttgcggacggttcttatgaggaacttccacagcgtgaatatgtggaagaagaaggacttccgagacaggataaatatgccatcggtcttccatgccctgatacaagaggacaaaaaggaatagactttcttgattttcttgattccaagggagttcgcttctctgatgtagcagatggtaaaatgacattggatgagtttatggatatcctgacattggatgactgtatcaatctccttggcggacagccaaacacaggatgtgccaatacatttggaatgggaaatcttccggaatacggagtcccgaatgtgatgactgcagacggaccagccggacttcgtattcttccgaaatgcggagtgaacacaactgcctggccatgtgccacacttcttgccagcacctgggatgaagaactggtagagaaagttggtaaagcaggagcagaagaagtaaaagaaaataatatcagtatctggcttactcctgcctgcaacatccacagaagcccgctctgtggtcgtaactttgagtattattctgaagatccgtatcttgcaggaaagacaggtgcagctatggtaagaggcatccagtctcagcatatcggagcaagtgtgaagcattttgcagccaataataaggagacaaaccgtaaggattctgattccagagtatcagagagagcactccgtgagatttatctgaaacagtttgagatcattgtaaaagaggctcatccatatacaattatgtcctcctataacctgatcaacggcatccacgcctcagagaacaaagaactcctgacaggtattctccgggatgaatggggattcgacggaatggttacaacagactggtggacattcggagaacactatcgcgaaacaaaggcaggaaacgatatcaagatggcagcaggatatccggaacgcataaaagaagcatacgaaaaaggctttattaccgaaggagagatccgtctcagcgcaagaagaatcctgaatatgattctgaaaattgactgatgagtatcactaatattttatacaggagcaaaaaagatgatggatgagcgtaaacgaagtttaagaaaagaaatagtcaggctggcacttccgatcgcacttcagcagttcatgacagccctggtcggagcatgtgatgcgatcatgctgggaaagttaagtcaggatgccatgtcagccgtatcactggctacacaggttacttttgtatttaatctgtttatgtttgcatttatggcaggcgagaatatgtttgtggcacaatattatgggaaaggggattacacaggtatttctcaggtgttcagccttgtgacaaagatttgtggatgtattgcagtagtatttctggcaggaacccttttctttccggaacagctcatgagaatcctgacaaatgaggaaactctgatcgttctgggaagtgagtatttaagagtcatcggcatttcctatgtgttttcgggaattgcacagactttcctggcgatcatgaagaactgtggtgcagtaaatatgagtaccctgatcaatggggttatggtaattctcaatatcgcattgaatgctgttttcatttttggcctgtccggcttcccgaagatggggattaaaggtgctgcactggcaaccgtacttgcaacagttgtgcagttcctgtggagtgttggttatgtattgtgcaggatcagagctgtgaaattcagtctcagaagctgtgagaaaaagttatttggccgtttctggcagaaaacagttccgttactgatcaataatcttgcatggggaataggtttttccatgtattctgtgatcatgggacatctgggaacggatgctgttgccgccaatggaatagcgaatatttccaaaaatcttgttgtatgtttctgcctcggacttggaaatgcaggcagtatcatagtgggaaaccgtcttggtgcagaccgtctgcaggaagcaaaagaggtaggcgagacacttaccaaaactgcgattattgcaggaattgtatcaggccttgtcctgatcgccttatcaccatttatcacaaaaatggtagatctcaccccgacagcccgcggatatctgcaaaaaatgctgctgatctcttcctattacatcgcaggaaaatcagtaaactgtatgacaataggaggaatcttcgcagcaggcggagactccaaatttggaatgctgtgtgattctgtaactctgtggtgtatcattgttcctctgggatgcatctgcgcatttatcctgaaactgccggttatggttgtctactttgtactcaatctggacgagatcattaaactgccagtggtctataaacattataagaaatataaatggattaagaatcttacataattttacacgtttcacaggcacatataccggatatccgggactatgtgcctgttttgttttaatgatatttatgcatccgtacataatagctgatgcataagatcacagtggctccgctccatgctgcaatctctgcaaagaaaataccgtcctgtccgataaaatggggaagaatcagtgcagcactgatacgcatgacgaattcagccataccacttaccataggcattaaggtatctcccagcccctgaagtgcagatctgtacacgtacagaaagtacaaaacccagagcatggcagccataatagaaaggtatttaaaagcaattgccagtacctgctgtgtctgctgcggttcacctgagatgaaaagtgagagaatattttttccaaataaaaacatggcagcagaaatgattagtgaggtaagtagggaaagcagcatactgctgcggacgccttttctgatcctgtcaatctttctggctcccagattctgacccacataggtaacgatggcatatccataggaaatagcagccatttccaacagaccataaagcttgtttgtagctgtaaatcctgctacaaaaaggaaaccgtagccattgatcacatactggactaccagaccgcccacaccgatgatgatattctggaatacaacaggaataccaagcttcatcaggcgggcattcatgccggaggcaggcataaaatctgctctggtcagatgaacgatatcaattctgcgtaaaatcaggaaacagtaaacagcggagaagctctgtgcgatcacagttgcgattgctgctcctgccacaccccatccgaagcctgccacaaaaaggatgtccagtgagacattcagcacagatgcgataatcattgcggtcagcggtgttttactgtttcccatagcccttagggcagaggcaaacatattataggctgctgtggcggggattccacagaaaatgatgcgcagatataacagagacattccgataatattggaaggtgtatgcagccctgttaataccagcgaagcaaatgactggctgagaatcaatactccggctgcgatgaatgcggtcagccggtaactgtgagccagagatttacgcagattttcgaaatcctttgccccataatactgggagagctggatggaaaatccctgagtgagtcctgtggatattcctgtgacaacccacatcagaaagtcaacagcacccagtgcggcaagagcctccacacctgcaacctggccaacaaccatggtatccaccattgtataaagctgctgacagatatttcccagcatcaggggaattgcaaaaagaatgatcaaccgtcccggtgaaccggaggtcatatcctgaatcttggttttcattagtataaaagttcctttcctgagcatatttgaaaaagtttagaaatgattattcgaatatgccctgatatttacattaataatttgtaactattcagtagtctgctatcccgcgaggtgttttggcacgtaagtaccaaaatcccgagacatacaagccaaaatgccatcaccgcaggtgatttttaatgcattttggctcgtaactgtgaaggtactgaacagttacgataattttatatcattaacgtgaaaaatgaaatataatatttcatcagaatgatataaatttatcgttactgttcactccgttcacagtaacttagccaaaattcattccagattgcctgcggcaatggaattttggcttgtatgtctcgggattttggcatattcatgccaaaacacctcgcgggatagtggcgtgtgaacagtaacaatttatctgttattgtagatatattaactgaatcagctgaataagttaagtcccctgcctcaattgcaaaaagcaacatactctgcagagacaatggctatttacaaatatgacaataacaggtatcattcttttataaatacgttaataaaagaaggtagaaacagaatgagcggactggaaaagaaatttgctacgaaatcaaaaatcgtaaattatattataaatagagaatccacatcaaaagtggaaatatccaaagaactgaatctgagtatgccaacagttctgtctaatgtaaaagatttattggaaaaaggtatcataatagaaattggagaatatgaatccacaggaggaagaaaggctaaaagtattggaatcaatccatcctatcgttatgcaatgggaattgtgattactgcaaatcatctgggaatggtgctggtaaatctgaagtatgagattgtaaaatcagagcggatccgtctgaaatttgtacctgatatgtcatattgcagtcaggtggcagattttgcggcaaaatttctggatcatatgaatgatgcagaacagaaagaaaagcttctgggtgttggaatctctattccgggaatcattaatcaggagcagaaactggtgataaaatcccacgcactgaaacttgaaaactatagtctcagtttcctggaacaggcattttctgtcccggtttatttttcaaatgatgccaatgcggcaatgatggcagaagatatgaacatctatcagaatgcaatttacctttcgttgaatcagactcttggcggtgcattttgcatagggggaaatttgttttccggagaaaatcagaaggccggagaatttggacatatgatacttgtacctcagggccgcaagtgttattgtggaaaatcaggttgtgcagatgcttattgcgctgcaggcgcacttgttggtgagtcaaaggattctgtggaacagtttatgcagctgcttcaaaacaatgatgaaaaggcagagaaaaaatgggaagagtatcttgattatcttgcaattctgatttcaaatctgcgtatggcatatgatatggatatcattcttggaggtgaaatgggtggatatctctcagattatatgatacctcttggggaaaaagtaatgaagtataatggatttgatcatgatctgagatatctgaaaaactgttcttataagaaagaagcctcagctgtaggtgcagcaaagcatttcctgcaggattttatcggaaagatatagccgatggcattcttgaatcactgatgatctgctgatataccatattaaacaaatatctgaatataaaaaataccctgattacaacaaagaaaggttgtgatcagggtattttgttattgtgcgggaattcagcagataattatgaggagtgttatagtaacatctgcataaaaataaaatctttactttgtgcaactggtagaaatgagaaatatttttaaatgtttattgacaaatttagcgatttgaataataatgtaattactttaataaaacatttaataaaagttaataaacaactagaggttcaaagtacattcaacaaataaggaggaaaatattatgttacagcaggttatgacaaatccaggagaaattattttcagagagattcccgtaccagagattaaagacaaccaggttttggttaagattatgaatattggtatctgtggttctgatatccatgtatatcacggaaaacatccttttacaaaatatccggtaacccagggacatgaagtatcaggagaagtggtaaaaacaggtgatgcagtaacagaatttcatgtgggacagaaagtaacaattgagccacaggtatattgtggacattgttatccatgccgtcacggaaaatacaatctctgtgaagagctgaaagtaatgggattccagacaacaggaactgcatccgagtattttgcagttgatgcatcaaaagtaacaccgataccggaagatatgtcttatgaagagggcgcaatgattgagcctctggcagtagctgttcatggtgttaaacagatgggcgatgtaacaggaatgaatattgtggtgataggagccggtccgatcggaaatctggtagcgcagtctgcaaaagggatgggagcagctaaagttatgatcacagatgtcagtgatcttcgtctggaaaaagcaaaagagtgtggaattgacgtatgtgtcaacacaagaaataaaaatttcggggaagcaatggtagaagcctttggaccggataaggcagatgttatctatgattgtgcaggaaataacattacaatgggacaggcgatcaaatatgcaagaaaaggaagcgtgattgtgctggttgcagtttttgcaggaatggctgagatcgatctggcagttgcaaatgatcatgagcttgatatcaagagcacaatgatgtacagacatgatgattatgtagacggaatcagactggtgaatgaaggaaaagtgcatttaagaccgctgatctctaagacgtttgcatttaaagattatctgaaagcataccagtacattgacgataaccgtgagactacaatgaaagtgattatcaatgtgcaggaaaaataaaataccctgctgatcataagtattatgtaagacaaagatataataaaaaagactgctgtaaagaagacatgagtaaacggaaagacggaggatggcagcaggcaggaggaattatggagagtaaaaacgaaaatgcaaaagttccgttgatcagtaaaatcgcatatggatttggcgatgtaggatgtaatttcagctggatgttcgtcagtaattttctcatgattttttacacagacgtattcggaatcagtatggcagcagtctctgccctgatgctgttttcgagattttgggatgcgatcaatgatccgatcgtgggtggactgacagataaaaccaaaacaaaatggggacgttatcgtccatggcttctcattgcagctccgatcacggccgtgcttctgattatgacattctgggcacatccggactggtcggacagatcaaaggttatctatatggtaattacatactgtctgctggtacttggatatacctgtgtaaatatcccatatggcaccctttgtggagcaatgacacaggatatcgatgaacgtgcaaagattaatacatcacgttcagtatctgcaatggttgcaattggaattatcaatatcattacagttccactgattggaaaacttggcagtcaaagtgctaaaactggatacctgctggtagcaatcatatatggatgtatttttgcagcctgtcatttcttctgtttcgcaaaaacaaaagagcaggtgattatgccggaaaaagacaaaatatccataaaagtgcagttaagagcagtgatacagaaccgcccatatattctggcattaatcggacaggtgttattcggatttacactttatggaagaaatgcagatgttttatactatttcacttatgtagagggaaatgcatcctactatactacatattccatgtgcattatcattccatccattatcggtgctgcatgtttccagcctgtattccgaaaattgaataataaaggaagaactgcatccatttttgctctcctcactggaatttccatgctctgtatgttcttcttcaatgtaaaagaaacaccggcagcgttctatacacttgcaggaattacacaattctttttttctggatttaacactgcaatctatgcgatcattcccgactgcgtagaatacggagagtggaaaacgggcttaaggaatgatggttttcaatatgcatttgtgtcactgggaaataaaattggcatggcaataggaactgctctacttgcagcacttcttggaaaatatggatatgtggcaaatcaggtacagaatccggctgttctcagtattatgagacattcctttactacaattccgggagttttatggatagtgacagcaattgtactgtttttctatcgcctgaataaaaaacgttacaatgaaattgtagaagacctgaaaaaaaaccgggtaaaataaagagtgtcgtgaagtgaattgcgaatatcaacagagtctccttgagcagcattaaaaaatctgcttaaggagatttttatgtctggagtttttgtggttgcatttttgttttatatgggtataatggtgagataagtctgcagatgaaaggaagacaatgctgacaatataacgaaggagcggagtattatgctgaaaagattcaccagatatgtaacccagagtgttgccggaatgattgggatttccgtttatgttctggcagatactttctttatatctgtatattccggtgctgacggactggcaatcctgaacctgatcctgccggtttatggactgatctatgcgattggggctatgatcgggattggttccgctaccaggtatgccataagcagggcaaaaagaaaaaatacagaacattatttcgtacagtcagtaacctggagcatactggctgcagttccatttatgctgatcggaatctttattccggacaaagcattggctttgttgggtgcagatgccggactgatcggacttggacgaaactatgtgagaattattctgatcgcaacaccattcttcatgtcaaattatacatttactgcatttgccagaaacgatggagcgccttctattgcaatgatcggttccatcagtggaagtatctttaacattatatttgattatatattcatgttcccggtcggtctgggattttccggagcaggactggctactgcaatctgtccgatcgtaacaatgagcgtctgtaccatacactacagaagcagcagaaaccatgtaggattccattggaaaaaaccgtcattcagacacctgatttcctgctgtcagctaggagtttccgcattcgtcggtgaactgtcttccggtgtgatcgccattgtatttaactttctgatcctgggaatcgcgggaaatatgggtgtagcagcctatggagttgtggcaaacctttctatcgtggcatttgcaattttcaacggtctggcccagggagcacagcccctgatcagtgaaagctacggaaaaggtcagcccactcaggtaagaaaacttctgaaatggagcctgctcgtatgtcttgctgtagaagcactgatccaattgatcatctggacttcaaccgacatgctaatcagcattttcaacagtgaaaacaatgttcagttattgaattatgcacacacaggactgcgtctgtatttccttggatttatagtggcaggaatcaatattgtactggtggcatatttctcagcagtagatgaacctaaaatcgcgattgtcggatcattcctgagaggaattgttgctattgttatctgcgcagttatacttgcgaaattatttggattaaatggaatctggatctctcttcttgcagcggagacggttacgtttctgacgattctgtttctggcatataaagacagaaacagaatcgaataacactgttgaaaaggaattcttgtataaacctccaaactgatgtaagataagattactcagtttggaggttttatttttatgtttaacgaaataaaagatttcgctgcgccggaactggatgtatatgccagaacatcagaagtgcagcttttacgatattatgaaccggaaccgggaattttcattgcggagagtccgaaagtaattgaacgtgccctgaatgcaggatatcagccaatctctttcctggtggagcataaagatctggaaggagaggcacaggaaatcctgaaacaatatccggatgtgccggtttataccgcggaatatgaacttctggtcaagctgaccggatttgccctcacacgcggaatgctatgtgcaatgcgcagaaatccactgccatctgtagaggaaatctgcagaaatgccagccgcatagcagttcttgaaaatgttgtaaatcctacaaatatcggagctatttttcgctcagcagcagcactccatatggatgcagtacttctgaccggcggatgcagtgacccgctttaccgacgtgcagccagagtcagcatgggaactgtattccagattccctggacatattttgataaaaaaactgtatggccacaggatggaatgaagattctgcaaaaactgggattcaaaacagcggcaatggctctgcgtgacgattccgtaggaattgatgataaagcactccggtcagaagaaaaactggcagtcattctcggaacggaaggtgacggccttgcatcacagaccattgcagattgcgattatacagtaaagataccaatgtcccacggagtagattcattgaatgtggcagcagcaagtgcagtggcattctgggagctgggacacagataagatataactcaggaggaaatgaaaaaatgtctttggaaaaagcagaaaaatatctggaagaaaaaggctttcttgaccatgtgatcgaactggaagcatccactgccacagtaacagaagcagcagaagcccttcatgtagagccgggtatgatcgcaaagactatgtcctttttgcagaacgataaagcagtcctgatcttaacagagggtacagccagagtagataaccgaaaatataaagatacttttcatataaaggcaaaaatgattccatttgatgaagtagaaaacatcatcggtcacgctccgggaggggtatgcccgttcggaattaatgagggaattgaagtctatcttgacgaaagtctgaaacaatttaccaccgtatatccggctgccggcaatgatcacagtgcagtaaagctcacaatctcggaactggaacaggtagcagaggcaaacggatgggtggatgtgtgtaaagaaacagaaaactgatcgttcatggtaacacccatgcattacatttatatgaaagaatcggttttaccagacttggcgtgattctccagggattcagaatgccggatgacattatggacaaatacaaagaacttgttttttcttcactcatctttatcttctttgaaatagtgaatataaaaggtggaaaattaatgaaaacagtaaaaactcctgcggggatatttaagatcaacaaagtgaaaattccctcagcatacacatgtgcagcagaacagaaaatagaatatatcagtgaaaatcatgtgcagattatcactatgaatcaggcagtatcatttggagatcagatattgtccccgagaatctgtcaaagctgtatgaatcctgaaaaaattacaatttatccactggaaatagaatactttggggaaaaagtgttttttacggatcactatagtgtaaaagaatggaaaaaaggcgatccattaccggaaatccatgaatggtatccgcacataaaaaaagccagatgcaacccgtgcaggaactgtggaagatgttaaaattgcacacttgttactgtttactccgttcacagtaacgtacacttctttaaatgacagaaacagaatgatagggattgttatcaacaggaaacaggaatataatatttctgttaagcaatatttatccaaaagcaataacttaaatggagataaaaaatggactacagaaaatttggcgaatgctattacataagaatggatcgtgatgacgagatcatcagtacaatcctcaaaatatgtaaaaaagaaaatatcagatcagccactttttccgggatcggaggatgtaaggatgcagaaatccaaacctttatcccagagacaggcagcttcgaggaacagcgcatttccggaatgcttgagctggtatctttaaacggtaacgtggtcacaggtgaaaataatacctgttaccatcatacccatgcagtattttcttataaagatggtgaacgacattgcatggcagcaggtcatatgaaatcaattactgtactgtatactgcagaaatcgaacttcatccggtaacaggcggaacgatccgccgcaaatatgatcctgaaacagggactggattctgggattttaattgaatcaagtaagtcccatgtttcaattgcgaaaagcaataagcagtgggtagatgtatgtaaagaaacagaaaactggtagttgacggtatgatatggaaaatggagaacagaagaatgggtattgtaatcagagaatatcagacagaagacgtaacagcagctattacaatatggaatcaggtggtagaggacggtgtagcattcccacaggaagaaaacctgacagaagaaacaggagatgcttttttcaaagaacagacttatacagggatcgcagtaaacactgacaacaatgaaattgtcggtctctacatcctgcacccgaacaatgtagggagatgcggtcatatatgtaatgccagctatgcagtaaggagagacctccgtggtgaacacattggcgagaaactggttcttgactgccttgcacaagcgaaagtaaaaggcttccgtattatgcagttcaatgcagtggttgcaaataacacccatgcattacatttatatgaaagaataggttttaccagacttggcgtaattccccagggattcagaatgccggatggacattatgaagatattattccgcattattatatgctgtagagaataaaaatatactgtagaaaaattttgaagccgttttcaggatatggaaaaggaacaattctttgagagtgtacagaatttaacacaagttctgtatactttttttattaaaaatgaaactttttgctctttaacaggatatataagaatgtaaaggttaaaagcttttaattttttaaagtattaaaaagaaagtagggttgatatgataggtgaagcagagcttttgcaacgtctcaggaacagagaaaaaaattcaatagatgaagcaaacgactatgagatcaaaaaagaaaatattacctttgttgatagctgcaacacttacaattggagttactgctgtggcagcaacaggaaagatttcaatgtggataggttcatctgcatcacgtgctgattatacatctcttccaacggtagaacaggttacaaaggatattgggtatagaccggtattgattgatgcatttgagaacgggtactgcttcaaaaagggcaatattatgaaaaatagttttaaggatgacaatgcaagtgtaattgagaagtttaaatctgtgtcctttgattatcagaagaatggagatgtcgtatcgtttgaacagcagaaatttaactcaaaacttatttcgccaggtgacattattgccactgtaaatggaacaaatctgtattatgtacattatataaataaggtggtatcggatgattacgaattaacagaacaggataaaaaagaccaggccagtggaaaagtcgtattcagttacgatgacagcgcttctcagattgaagtcagtcaggttcaaagcgttaactggaataaagatgacatccagtatgatttgctgcaaatagatggaaaattatctgccggagaacttgcagatatggcgaaagaggttattaataatagaagataaagaaaaaaggggctgtctatttcaagacagctcctttggtatatttatgatataaagttaaatgatataggttattcgaaacgaggaattgtaataacttctccacccttcatagcggattcgtgcgcacagattcctgtacctgtccagtaagcacccatgatgtcgtcaatagcaggtttacgttcttccagaatggaacggatgaattcatgtacaaggtgtggatgggaaccaccgtgaccgcctccctgggtgaaggaaagatgggtgttctcattgttatatactgtgttggtggtgaaggatgcgatttccttcggaagaaggtgtgcataatccgggatctggattcgtttttctgcaatttttgttccacggctggatttctcgctgtcttcatccaggatatcttctgctttttcaaattctcctgtgcgggtaaagagaactggattttcttcattaagttgctgccattcgaagctctcgttttcaccgtatacccggaagcattcagaatagtttctggctacaccatacagaaaacgttccatttcaatagtcacatcgctgtcctgaagagaaataaatgcagattcgaacgcgaatgggcagccgtatttgtcagccagttctttgcggatttttccggaacctcttgcataaaccttgtctggcagatgtccggcaagcataagacacggagcaacggcgtgtgttggatgcatcagtggagggaagccttcccagtattccggccatccttccatgtcctggtaatgtgcacaggtcatatactggagacgtccgaattctccttttttataaagttcctgaatatagaggaactctctctggaaaatagttgtttccataaacatataatttttgccggaggctttgcgggctgcaatgatgtcatttaattcttggatgctcattcccatgggaatcgtacagccacaatgtttaccagcatttaagacacgtacagaaaacggagcatgtgttgctggcggtgttacaagatgaactgcatcaatttcaggaatatccagtacatcctgcagatctgtgaaacagcgttcatccggaatgctgtatcgttcttttgcaatattcagaagtttctcatttttatctacgacatacaccttatcaatatcaggatgtttacagtagatagcaacgaattcaagtccgaagcctaagcctactaaagcgacattcagttttttcatgatggaaaatcctccttaaaaaattaatatagaaaaaatcatcaggatgtcaggaatcctgcatctgttttgtatgtctgtgattatacgtgatgaaaaaagaaaagagaataaagataatttagatgtttggacaaaaaaagataaaaataataccagttccgatcagtcttacttttttttagaaaagatggaaaaagaaagaataatatcgttattcaaaaatcagggatttcatgttttaataagtgcatagcagaacaatcgattggaaagcaaatcagaaatatagaaataagagagaagataagaaggaggaactatataatgaagaaaagcgcattagctgttatgctggcaggggttatggttttaggtgtacagacaggtgtgtgggctgcatctgatacatcaaatcaaaaagaaggggaattgacacttctgctaacaaatactttgattgatgggtcaggagcgaatagtgaagaatttaaaaaagtaattaaacaatatgaagaagagaatccgggagttaagattaccttacaaggtgcttcacagcaggatattaaagaatctttccagacagctgctctggcgggtagaggtgcagatattgtgatgatggataattcaggacatgccattgatcttgctgctatggggcttctgtatccattggaagaacttactacagatgaagaactcactgcacagtatcaggaaggacctcttgattccggcaaattcgaaggcaaatattattcagtaccatggaatatggactgtacaggtctttattataataaagaacgcctggatgagctgggaattgatgtccctacaacgtgggaagagctttcggacgcagtagataaagtgaaagaggcaggttacggtggaattatcacttatcagagtgcatatgcgttctactcattcttctatcaaaatgagtgtccggtaattgatacaagcggagatgttccgaaggtagtaattgacaatgaggagggaaaagaagcatggaattatatctgtgatctgatctccaaaggtggtctggtagagtcttttaaagaagcaaccacatgggacaaagtatatgaaagctttgcaaatggagaagcaaccttcctgttgggtggagattggtgttctgttgaagtggaaaatattaatccggatatggattatggtattgccccgatggtgaaagggaaaacagaagcgactgtactgggaggctggacctggaacattaatgcaaactgcaaaaaaccagaacttgcctatgatctgcttcagtatctgaactcagaaaaaggagattctattctggctgtagagggaaaagcatctgcacgcaaggattatgactatgttaaatcattggaaggaaaggataagttaaaagtttttgcagaagaactttcatatacaaaggcaagacctgctgttattaatgaaaaagccattgatgaactgattattaatgcaatcttggaagtagactatggacagtcctcagctgaagatgcgctgacatctcttgcacagaagcttaatgaaaatattgcatctaactatcagtaaaaatgtctggaaaataaacatgaaatgataacagaggcgctggcgtgaaatggcggcagcgcttcttcattgagaagggaggaagattatgtcccaaatacgtagaaaagaaggcctgaagctgagaaaaaatcttccgggatattttctgatggcaccagcagtgattgcggtactggcgctttctgtgtaccctcttttcagaggtatttatctgagtttcttaaattataaccttgtacgcccaaatgatcctgcatttaatacctttgcaggtttacaaaattatattaatatttttaaagataaagtgttcctgcagtctattggaaatacagtaaagtggacagtggtgaatcttctggtacagcttgtggcagccatgcttcttgcacttgcactgaaccaaaaactgaaaggaagatctgtatacagaaccctgattctggttccatgggcagttccccatgccatagcagctatgacctttacatttttatacaatgcaaatgtaggtatcattaatattctggcagtgaaactgggaatgattacagaatctgtatcctggcttggaaatgtgggatcagcgttctggtgtgtaatcttggtggcaatctggaagggaattccatttcagatgatctttattctggctgcactgcagggaatttccagggatgtgtatgagagtgcagaaatagatggtgccagccgttggcagtgtttctggagaatcacacttccgatcattaaagagcctctggctatttcaaccattttgaacctgatcggtattgtgtcctgttttaacaccatctggctgatgaccaaaggtggaccgctgtacagcacagagattgtttatacctatgcatacagaagagcatttattgaccataatttcggaactgcagcagctgcatctgtggtattgtttgtattcatggctgttttttccggagtttatctgaagatggtaagtgagaaagaatagggaggaggaaactatatgcatgcaaaacaacgaaatgaagccatacggcatgtggtagcctatgtatttacaatagctatggttttccttgcagtgatcccgtttatctatgtggtactgactgccctgaaaacaaaggaacagatatatgatccatcgcagatcataccgacacatatcacatttgacaatttcagacaggtgctgtttcagtcgaatttcgtaagatattttatgaacagtatttttattacactggtcacaacactgatttgtatgatattatcagtaatggcagcatatggacttactagatatagaatcgtaggtgccgggaaaatcaagatggcggttcttatgacaagaatgtttccgggaattctgttgtgtattccttactatattattatgaaacagttgaacctgattgacagttatgtaggactgatcctgatgtactgttcttttaccctgccttttgccatatggaatacctgtgcattttttatttccatcccttgggagttggaggaagctgctaggattgatggctgcagcaggttgaaatcttttttccatgtgattattcatgtggctaagccgggactttttgttacagccttgttctgttttatgacatcctgggatgaatatatgtatgcttctatttttattaatacaacttcaaagaaaaccattcaggttggtatgcaggactttgtaggacagtattctgtagactggggactgctgatgtcagcggtagtaatcagtctgataccaattctgattttctttgcattggtgcagaagaatctggtgcagggactttctgccggtgcagtgaagggataaatacagatcagatgtagaaagaggaaatttgcgtatgagtttcaaacgtaaaaatccgggtaaccagagcataagaaggcagctcacattttatatgggactttttgtggtgctgccgttgtgcctggctttgatgcttctgaatttctatcttcagaaagttaccacggaaaataagatcaacaatgagacagatttgctatcccagatcagggataatacagatcagatgattgaagtgaccaactatgctacatgcatgttgatgacaaataaaaatacactgaagaacctgcgaattttagagcaagacggggattcctacgagatttatcaggcgaaaagagaactttctaatgatatttcggatgtagagagctccgtcttaaatgccgttggcggaaaagtagctatacttacgaaaaaaggatatatgatcggttcttacacattaagcagaacagaaacgaattatgagaaagaacagtggtatcaggagattttggagaatggaagaaagataacttgcagtacaggtataggaaccatattccaggaaatgacaatatatgacaatgtacagaaatatttttatatgggacgggaaatactggattattccgggaaaaatctgggagtcatgctgattcgtctttccgagaaaaaaatctggggaaaactggcagcaagtatggtgacagaggaaggcggtgccctttatatcctggacagaaacaatgatatactgatggggtataatgagaaatatcagaaacagctgaaagaattgcgagaacaggaaactgtaaaggagatttctgaggatgaaattacgaccggtaatctgaaaaatgatttttattatatggaaggcgaactggagaatgcttccaataaactggtctaccttattccccaggaaattttcctgaaagaaaacagaaagattcttcagagaattctggaaatgttacttttggtaattggatttaccgtctgtaccatgttatatttttccaaaaaaatcgccagacctctggttgaagtggcacagactctggaaaaagctcccaatggaatgacagttctggaagaacctcaaggctcctttcaggagatgtgtaaatttgtatccagctataatcaggctgggaaaaagatagaagagcttctgggtaatgtggaaagagagagcagattaaaagaaaaagctcattatgagatgcttatgtcgcagatttcccctcattttatctttaatacggttaattccataaggattatggccgtaaaagaaggacaggaccgggtaggcggaaatgaaaacacggaaaaagcactggaggcactgggagatattctgcatgcagtgtacagtaatagaaatggcatgactactgtggggcaggagacggcacttctgaagtcatatgtagatatcatgcagatgcggtttggaagttcgtttcagtattataatgtaattccaacggaactgttctattatgaaattcctgcatttaccatgcagccgattgtggaaaatgcgattctgcatggagtaaaaggtgtgacagcagggcagatcatcgtttctgcaatagaatatgagaatgattttgtcatatctgtattcaataatggaaattctgcggataaaaagaagattgaagatcttctgaaagaagagaagaaccagagagctgtaacaggaatcggactttataatgtgaattccagattgaagctcttgtatggggaatcctatggactgatttataatgaaaaggtcagaaatggttttgaaatatgggtacgtcttccaaaaaaaattacagaatcagaagaaaggtgataaaataggataaaaagacagtaattattatctggatgaagggaagaacattctatgaaaaaagtactgatcgtagaggatgaaattttggcgaggcttggactacgtcagcttgtagactggaaaaaactggaactggagctgttgccggatgcaacagatggagaagaggcactggaaatgatccggaacagttgtccggatatcattcttctcgatctgaacataccaaaagttagcgggcttgaaattctggaatttctgaaaaaagaagaaatgccaaccaaagtaatcgtagtaagctgccaggaagaattcgatgttgtaaaaaaggcaatgaaacttggcgcgtatgattatctgcgaaaactaaatctgagttccgatgaactggaaaatattctggaaaagtgtctggtagaaacagaagaaagaattacggttcatatgcagggaatacgtgagatccgttatgaagagattgtgagagacagcagagatattttggcaggtgcctgtaattatcagacattaatctgtatactggcgaaagatacagaggagttgtccagggttacggaaataatccataaatgggctgaaaccgaactcagggaaggtctgcagatccagaagggaaatcagtatggatatttcctattggaagaaaaaccagaaaaatctgtttatatggaattgaagaaaagggcagagcggaaaacagacagagaactgtacatgggaatctttgaaggttgtatggaaaaaactgcggatattgttcgggctgctgcgatggctgaacagatacaacttttcagttattatgataaagaagagaagctggtgttttttcaaaagaagattgaaacagaaggtcatagtccacgaggaatgcatggatatctggattccctaaaagagaaaatcagaagttttgacagagaaaaaactgaacaggagctgcatggaattttcggactgatccgacaggagtcttatatcagtatcaatgtgctgagaagaaattttatggatattctggggatttattctatggttgcacagtcactgaatggtgcgttggaagaaatagaattggacggagataattgtcattatcagaaaatcatgatgatggaaagtcttagggaaatagagaaatggttcctgaaatttaataatatttttatggaaaaattctggattgcctacaaatgcagcaggtcagaaattctgcagaaagtagtaaaatatatagaagtgcatatcatggaaccaatccatctgtcagatgcagctgctgaaacaggagtttcttcagcctatcttagcaccatgtttaaaaaagaaatgggttataattttatagaatatgtaaatctccgaaaaatagaactggccagacaaatgcttcaggatggaaaaatggtctatgaagtctcagaacttcttggattcgaaaacagcacttatttctccagagtgtttaaacgctatacagacgtgtcacccgatacttatcggaagcaaatgtaaaccaaaagcaagaaattgggttgacaatcctccccgcttatgatataaaaagaaggtcaaaatcaatcattaacagggaaagaggagagtcttattatgagtcagtcatatgcaaaaagccctgctgcagagagaaaatttacaaccagagaaatggtactggttggtatgtttgcagcagttcttgcagtaatatcacagatttcactgccaatgcctaccggtgtaccgatcaccattcaggtatttggtgtagcacttgtaggcgcagtacttggttccaggcttggaactacagcaacactggtttacgttctgttaggagccatcggtcttccgatttttgctaacttctcaggcggaatcagcagcattgtgggagttaccggaggatacatttgggcatggccaatcatgacctggctctgcggaatccgtccgaaaacagagaacaagacaaagaatcttgcaatctcaatcggattcgcactgatcggacttctgatcgttgagacaatcggtggtctgcagtggcactttgtaggaggctccatgagcatcccggcaatcgcagtatactccttaacagcatttattccaaaggatattgtgatcacagttcttgcagtactgatcgcaattcccatcagaaaaggaatcaacaatgcaggaaaccgctgataaaagtaacaggttaaagaatagcctgccggaagacaatctggtaaagcaggaaaacataaagattcacggaatcggacttgataaagcaggacggtgtacacactatcacacacagcttgacatagctgcattgctttgtgcgaaatgcaggaaatattacgcatgctattcctgccacgatgaactggaagaccattcatttgttgcaacaacaccggaagaagtttatcctgttttatgcggaaactgtggcaggaaacttacacttcaggaatacaaaaaaggcagctgcccttactgccacgcaggatttaatccaaaatgcagtttacatgagaatatttatttctgttgcactatgtaacgtgttttgaaaaacatttccgcaatctgcacgccccactttgcagtatattttgcagaaagctttttcaaacacgctctaatgtagagaatacaaaataacaaaaaattttgtattctctttttatttgtaaaaaaatctgatatactgattaaagttagaatagactaaccaaatcaaacaaataacaagaacctatttcttttatttgcatacaaataaaaacaggaggaataaattgatggatataaatgtattttatggaattttgattccttttcttggaacttctgcaggagccgcctgcgtatttttcatgaagaagaatctgaatgaacagattcaaagggcacttaccggctttgcagcaggagttatggttgcagcttccatatggagtctgctgatcccggcaattgaacagtcttccggactggggaagctttcatttgtaccggcagcagtgggattttggataggggtgctttttttgctcttgctggatcacatgatcccgcatcttcaccagaacagtgacaaggcagaaggtccgaagagcaaacttcagagaactaccatgctggttcttgcagtaactctgcataatattccggagggaatggcagtaggagtcgtatacgcaggctatttaacaggtcacgcccagatcactataatgggagccatggctctttctatcgggattgccattcaaaactttcccgagggagccattatttctatgcccctgcgttctgagggaatgggaaaaaccaaagcctttgcaggaggagtcctgtccggaatcgtagaacctgtcggtgcagtcctcacaatcctggctgccggcctcattgtcccggcacttccatatcttttaagcttcgctgccggagctatgctctatgtagtagtggaagaactcatacccgaaatgtctgccggagaacactccaacattggaactattttcttcgctgtaggattctctctaatgatgattctggatgtagctcttggataaaaaaacagctgtccgatttatcaccgggcagctgtcttggcgttgagagatattttagaagtagtggaaacctgtgaaggggcggcgtcagccaaatggcggggttctgatctgtacagatataaaataccgccaaagaaaccaaagatcaatcctgtatacccgccactgcaaaggacaacagttacctttgtaacaaaggatataccaccgatcatgcagatcaaaaagcctgccagaagaccgatggttgtccatcctataagtgaaatagccagaaaggctgcagaagcatgtgagttttttacctgtttattaatagaattccataatgtctgatacataatgattccccttttctctttcaattctttgattactattatagaaacagtttgtaaaatacacatgcgcgctaatgaaaaatctctgtaaaattttctttctctgttatatgcagaggacggagaaagtacaagacagaaaaacaattacgtatattatacaaatgaatgcatttgaaaatgattttatagcaatcctgtaaaataatgcatcttaatccagcccatcagagtgtgaaatcctgcgtcggatatctttgccgtgcgtcagcacgcctgcagatatcttctttgtctttcgcactctgctgaactgtcttaaatgcattatttacgaggattgctataggtaacagataacgatataaaatgaccgtatgcgtgcgaagcggattgcgaatatctgcttgataatcatacatattgcataaaaacacctatctataattgtaaaatatatataaattatctcttgatattttataaaaaaaagagtaaaactttagataaataaaaaagagaaatgcatagaacaggacaggtcacagaaggaaccggattacagagagtcgcaggcaggtgagatgcggcagatggtagtttgtgatatcacccgggagcatcccgctgaaatctatagtaagccgggacgtggtcttcacgttacaggagaagctgtttggcttagacagtgttaagagattgtatctggtgacaggtataataatacaaagtggtaccacggaatattccgcctttgttatccaattggaaattggatagcaggggcgtttttttatatataaatataaaagaaagaagagggaagacattatgagtggaatagtaatgatgataatagccattgtagtgctgggtggagcatatcttctgtatggccgttatcttcagaacaaatggggcattgacccaaaagcaaaaacaccggcatatgagatggaggatggagtggattatgtaccggctgataccaatgtggtatttggtcatcagtttgcatctatagcaggtgcaggtcctatcaacggaccgatccaggcagcaattttcggctggcttccggttatgctctggatcctgatcggtggtgtattttttggagcagttcaggattttgcatctatgtatgcctctgtaaagaacaaaggccgtacaatcggatatatcattgaagcctatatcggaaaactgggaaagaaattatttcttttattctgctggctgttctgtattctggttgttgcagcatttgcagatgttgtggcaggaacctttaacggatttgtgacagataacgcaggaaccgttaccaaggtagcagcaaacggagcagttgcaacaacttccatgttatttatcatcgaggcagtgggactgggatttttccttaaatattccaagtttaataaatggatcaatactgcagtggctattttattattagtgctcgcaattgcgctgggacttaaattcccggtatatgtaagtcttggaacctggcatattattatctttgcatatattctggtagccagtgttgcccctgtatgggcgctgctccagccccgtgattatctgaacagttatctgctgattttcatgatcgttggtgcggttatcggtgtatttgcagccaatccatcctgtaatcttaaggcttttacaagctttaatgtggacggacagtatatgttccctattcttttcgtgacaattgcctgcggtgcagtttcaggcttccattcactggtatcctccggcactgcgtcaaaacagatcaaaaatgaaaagaacatgcttccggtttcctttggtgcaatgcttatggaaagtatgctggcaattattgcactgatcgctgttgcatcctttgcagatggtgaggcagcagcacagggacttaccactcagccgcagatatttgcaggtgctattgcaaacttcctttctgtaattggtttgccacattcactggtatttacactgatcaatctggctgtatcagcttttgcgctgacatctcttgactcagtagccagagtaggacgtctgtcattccaggaatttttccttgattctgatacagacgaggaaaatatgagcccgttcttaaaagtagtaaccaataaatattttgcgacgatcattacactggtacttgcctatctgcttacaaaggtaggatatgcagaaatctggccgctgtttggttctgccaatcagctgttatctgtacttgcccttgtagcctgcgcagtatttcttaagaaaacaaaacgtcagggctgtatgctctggatccctatggtatttatgatggcagttacctttactgcactgggtatgaccatcagcaagcttacaaaagcattatttaccacaggccttgatcttggaaataccttacagcttatcttcgcagtgttactgctgatccttggtgtgctggtagcaatccagggagtgaagaagctttttgaaaaaaatgatgaaaaacagactgcataatttatgaaataaaattgttgatatttttacatcaaaataaaaacctgaaaaaagacactttgggaaagttttccgaagtgtcttttttaatactcagccaatcaatttctcattcacatactcaaatccgagacgtttcacagtatctgcaaatcgttctcctgcgattccttcatttttgaagagaaggattgctttctctatgactgccattacttcttcttcctctgtgaaaattctggtaagagcctgaccgtgtgagattcgcttaccccagcggcctccgatatagattttataaccattctgatattccggtactgcgccgaaaggacattttcctttgcatcgtccgcaatggatacattctttaggatcaatgtaaagtttaccgtcaactaatttcggaacgtggacaggacagcttttttcaatctgacatttcttacatccccggcatttttctgcatccggttttgggattctctggccgataattcccatatcattcagattaggttttacacaattatttggacatccgccaactgcgatcttgaatttgtgcgggagtaccacatcgtgatagcctacataaaaacgctcatggatcttcttgctgagtgcaaaggtatcaatcagaccatactggcaggttgttcccttgcatgagacaacaggacgcactttagctccggttccgcctgtcatcaggccatgctctccaaggaaggcgattgttttctcaatattatcataaggaactccctggatttccatactcaggcgggttgtcatagtgatctgaccatttccgaacttgtctgctgcatctgcaatggcacggtgttcatctgtggtaatatgtccatttcctgtgatgacccgaatattaaagatgtcatcatatcgtttgtcctgaaggcatccaagaccttttactcgcttgatttcctcgggactcagttttttgttggcggatgttgttattttttccttattcatgtttaagtatctcctttatgtagctgttgcttttctctgatatatacggcgtttcttttgttgattataggcttcatgaatgataaaatcaatttatgagtttttattatacgataagtaacatttatggaataatgcaactgtgaaactgaaaaacagaaacctttataaaaaagccttcagggcagaattttttcttattgcacagaaaaaactatctgatatcaatagagtggaagagttcaaggagaatattatgttagatcacagaacagaaacctttatggctgtatgcagtgttatgaattacagggaggcggcagagctgttacatattacccagccggcagtcacccagcatatccagtttctggagaaagaatacggctgccgcctttttctttatgaaaacagaaaactgatcaagacccctgcagcacagatgctggaggattacttgcgttccgttcagcagcgtgaaaattttctcagggaaaagataaaaaacaatggtctccgggaactgcgcatcggtgcaaccaagaccattggtgactatgtgatcacagacaggattcacgatttcttaaatcagccggatacagcactgactctgatcgtggataacacaaagcatcttttgcatttattggaacagaatactctggactatgccatcatagaaggattctttgacaaaaacagatttggaagccagttatatcgccgggaaccttttgtgggaatctgtccgaaggatcatccctttgcaggccgtgaagtatctgtagaggagattctgaaagaaactctgatccatcgcgaaaacggctctggaactctggctatcctggaggaaaagcttctggagcataatgaatctttggagcgttttcaccggcatatatgtatttccagctttaagatgatcatcgacctgatcaagtccgggtatggaatttcatttgtatatgaagtacttgccaaaagtgacccggagcttgggatttttacattaaagggtgagcccatagtcagagaatttaatgttatttatctgaagcatgcggatgtgcgggagaagatggaatggtttttatgaccgcttgcgtctgtactcgttgggagtcattcaaaattgtttcttaaaagcagtttgaagattagaatactgccgatgaaatgattttctatctaaattaatcgaaattatcatccacaaaagtatattgatttcattttctgcatatgctataattgccataggcaaaatgataaaattaaattcattggtaacacagcaaaaagcctcggaggtcgcatctccgaggcttttttattccgttttggcaagggtggcttattccccaggctggctaccagctactattttctatccagccatttgcaaatgtaataggtgattacacctgccagaatagaaagcataaatgataaaattgtatccattgatagcaccccccttcctgtacctgtttaggggtggtagcttggatattatatcataaatttttataatataatatattttttattatacaactgcgccgaagtaattttcggattatccagcactaatattgaactttttcagaaattttcattctcaatatacaaaagatctcacattcgattatttaaaaacaatttcttcagtaatccttccatgtgtctttgtattcatgaactcaatagataatttgtaatttccttttccaccagttggtttaatactattcttatcaaatatactaagcgactgatactccttactgccagatctattaagagttcttattcgattcacttcccagccctttttgggagttatgattaattgatttttctgttttacatatttatcatagctcagataacgtctgtccgttttattaaatttgcttccttttacagtcgtacttccaattttgattgaagaaactggattgttatatttacgaatcgtaataatacgcttagaattatcatactttgacttagttgtaatcgttgtctttcctgtttttttcgggaagaaatggtaataataatatccatcatgtcctatggatgtaactttaatgtctccaagtttctgtgtcattgaaaacttaaccggatctttttttggatggtaagatcgtgaattactcggtaactgagttaccagagcatctgaattaaggcgggataccgccttttttcagggtgcatccatggcaccactactgtttgctctttagagctatacagctacttttattatttccggtgttttcagtccggttacggacagttctttttttactccggatacggagtgatattttctcaggatattatatgcgcctaccgcatctgcattatagactctgtttccatccctatatgatcctctctctttccggttggacggttccgcatatcttttccctacttccggtgacagaggactgcactggctggtataactttcttcctgttttataaaacggatcccatatcttttcagcttatattccagcatgatatagatcctgttatacggcaggctgtggaacttctggtttgtcctgtgtcccaggtctttttctctccggatgttctggatatcccctgtaacgacacaggtgatctcctgttcccggcagtattctgcaagatatcttgtgatcttgtgcagatagtccgttactgagtcttgttttctcttatataacttcctgatatgttttgatgtgaccggatgctttactccctttccggactgctgcccataccactgggcctgcacccttgcgatctctttatggaaatatctttccaattcaaggtacttcctgcccaggataaacgtcttcccattttcagaatcataacacgtcataaggttgtgaagccccagatcaatagacagttcatgtccgttctgtggaagttcttcctggtcaggaatctcataaacaacaataattttacagcttcccttctccggcggatagatccgcagctgtttgatctggtccatgcccctgaaaatcttattttcaaggtaaagaaagttttcatggatctgatatgtttcttccatatatttttttaatgtctttggaagggacaggcggactctgtccgtatcccgctcatgcacgatccccatctgcatataggtaatggggatactttcctgcttaaaccgcggcggtctgggagcctcgatccccccggatcttttcagggcatagaaagacttccatgccttgtccagcagcctgcagacttcctgggcagtctgggatgggagctgtttataccacagatcctctttatgggcttttttctgatagtaccagtcaggatactgctccatccctgtttctttgtaatgctgacgctcgtaattacagacattccagagcttggatgctgcataacacatatgcccgatgaggttcgcatattcccggctgacctttatggatgttttctttgacagcagcatttcctctcctccatcatatcagtacgctttgctctgatgttcaatatacctgcggatgttttcttccgatacagttccgaccgtttccacataataggaatggttccacagctcccctttccaaagctggtttcttatttccggaaaacgttcaaaaagtttcctgccggagatccccttcaggtatttcacgatcgcagttatggataatttcggaggggctgacacaaaacagtgtacatggtctcctgcaccagttcctgcagacatgcctcgacctctgcatttaatatcttccgccggtatttcactgaccataccatatggtaattaatattgcacacacaagtgcggtaatgtataagattttctttcatatatatatgataccatgatatcaaaaatttcgcaataaaatgtcgaacatattttctctttataatgctggatacagctttttatagggagaaattgaatgaaaaccgttttgttatttttatttattatgcgtgcagatatgcacagtttgcgctttcatctactacaatatatttatggttaatatcccttacagccagtaaggaattatccatcttgttgcttaagctgttaaaatgtatggagcaatcggtatatcgtcttattcatcttggacttcgcgtccgttgccgagactgataaccagctcctcatttgcagcgttcgttttatgcaggttgaactgccttcggtacgttcgtgtcacaccacagtagatggaataggcaatgagtaaaactggtctttatccattgcataatctgattttaaggagtgacaaatttatgaatatgaatgcagtaggtattgatgtttccaaaggaaaaagcatggttgctatccttcgttcttatggtgagatcatttcaaaaccatttgaagtcaaacacacagtcagtgggattcgctctctcattgagcagatccaatccattgatggcgaatctcgtattgtcatggaacacaccggtcgttattacgaacctcttgtccgtgaactttcgaaagctgacctttttgtatctgccataaatcccaaactcatcaaagattttggagacaactctctccgcaaagtaaagtccgataaagcggatgcagtaaaaattgcacgctatactcttgacagttggacggaactcagacagtatagtctcatggatgaaattcgtaatcaactgaaaaccatgaaccgccagtttgatttttacatgaaacacaaaaccgctatgaaaaataatctaatcagcatccttgaccaaacttatccgggagctaacacttattttgacagccctgcccgtgaggatggaagtcaaaaatgggttgacttttcagccacctactggcatgtggattgtgttcgtaaactctctctaaacgcctttatcgaccactatcaaaagtggtgtaaacgcaggaagtacaacttcagccgttcaaaagctgttgaaatctatgaagcatctaaggagcttgtttctatacttccaaaagacgatctgacaaagttaatcatcaaacaggctgtagaacaattaaatacggcttcacagactgtggaacagcttcgtaccatgatgaatgaggctgcttctaaactgccggaataccctgttgtcatggctatgaaaggtgtaggtaaatcgcttggtccacagcttatggcagagattggtgatgtctcccgatttacccacaaaggagccattacagcctttgcaggcgttgatcccggtgtaaatgaatccggttcatatgagcagaaaagcgttcctgcttccaagcgcggttccagtactcttcgtaagactctgtttcaagtcatggatgttctcatcaaaacaaagccacaggatgatcctgtctacttgtttatggataagaaacgagcacaaggaaagccttattacgtctacatgacagccggtgcgaataagtttcttcgcatctactatggtcgagtgaaagaatatctgtcttcactcccagaataaatatctcgtcaatacctttattttagaccagcgaatatcggtggtcttattttaatgttcaaaatcttgcaaaaatttttgcctgaaatcatcaatttgctattgactttttatttgcaggctcggtaattgaattgccgaggattcccgcgtattatcctaaaattgttataataagagtccgtatgcagaacttttgtatataatagactaagtgaatatctggaaatgagattaaaatgccagaccagaaaatagataaccttttaaatcttgcaatggatgcaacctcacaggagcgtagaaagtcaggaaatcttaacataggatatgatcctgcaaccaggctatgggatgtgatcataaagtacagcggaccggaaagtggtctggctggaaatggaattcaggtagtgccactgttagggggctatgcagtggtaactttgccggaaagtgagattgatgcgtattcccacagagcgcaggtggaatttatggagaaacccaaacgcttgtattttgaattgtttcaggcgaagggagcgagctgcatccgcacagtgcagaccggcaggaatggactgacgggaaaaggaatcctgacaggagttgtagattcaggagtggattattttcaccctgatttccgaaatgcagacggaagcagcagaattttacgtttatgggatcagagcatacagggaaatccacctcagggatatgtgacaggaactgaatatacgaaagagcagatcgatgaggcgcttgcacttggagaaaaccagggcaggcgtcttgttccatcttcagattacagtggacatggaacttccgtgctgggaattgcagcaggaaatgggagggcatcagatggagtgaatcagggagttgcctgtgaaagtgatctgttggttgtgaaaatgggaattcccagagagaactcctttcccagaactacggaactgatacaggggattgattatctggtgaggcaggcgctggctatgggaagaccaatggtgatcaatctcagttttggaaataattatggctcacacaaaggagattccctccttgaaacatatatagatatggtttcttccataggacgtctggctatctgtacaggtacagggaacaacggcaatcagcctctgcatgagggaggaatcctgaaacagggacagaccagacagatagaattatctgtgagcagcagagaaccaacattaaatgtgcagttatggaaatcttatgaggatgaaatgagtatttatattgaaaatccatccggaaatcggatcggtcccttagatgaaaaacttggtcctcagaggtacaggctgggaaatacagagcttttaatctattatggcaaacctggaccttatcatctgacacaggaaatctacatagattttctttctgtggaaacttatgtggacagtggagactggaaaatcatcttaagtggaaaaagggtcagaggaggagaatattatctgtggctgccgggtggaaataccctgaacagaggaactgggttttatgaaccaagagcatatgggacattgaccatacctgctaccgcccggcgggttattacagttggagcatatgattcgctggttgactcctatgcggatttttccggaaggggcagcagaatgctgccatatctgaaacctgatctggtggcacccggagtgaacatagttgcccccgtacccggtggtggttacagaacagtaacagggacttcctttgcaacaccctttgtcagcggatccgcagcattgttaatgcaatgggggattgtaaatggaaacgatccctatctctatggggaaaaagtaaaagcttatctccgaaaaggcgccagaccattgccggggtatgaggagtatcccaatgaagaggtgggatgggggcgattatgtcttgcagaaagtatttcattatagttgaaaaatatcttcccagtccatgaataatacatagaacacccttccgtattgctggctttctacgattcttccgtgatcgaggacagaaagataggagccgtcagcttttcggaggtgaaagtgaatatagtcattttcattaccactatcaatctgttcccagatgctggattctatctgtttctgttcatctttcaggatcaggttgcggaagcgcttattggtgagtctgaagagctcgtccatatctttatatccggtcatatgaaggaactcatggtttgcataaaagagttcgtcatcgtctttgtccgctctgtatatgataaatgcacccggaaggtgttcagagatatctttaaatgcgaatcccagttgtttacggattccggactgaagaccttccctgtaggccatacacccgttttttccgtgaagttttatttcataaagggctgcatctgcacagcgcataagctgtgaacggctggctgcaaatgtgggatattccgcatatcccagagaaatgttaaatgactgttcttttcctttgtatgagaatgcctttggaagtccggtaaattgctgcagcagttcttttgcatcttcacagttataattttgtaaaagaatacagaattcatccccgccgtttcttcccagtaatgcatcagatgaaaagaatgttttcatgctgtctgccagactctttaatgctttatctccataggcgtggccatagatatcattaataaacttaaaatcatcgatatcaaggagtgcagccacaaaatgtgctttcggatttttatccatcatcttttctgctgattcgtcaaatccatagcggttgtaaatacctgtaagagaatccgtgcgtgccagtatctgaaatttatttttgttttcgtttgataccagccataccctgataagtcccgacagaagtaaggtgatggcagtaaatattatactggcttttgctattaataaattgtcttgccatccgctttcaggagttaattcaaacttccagctttctttccctatggtaaaatcataagaaaccggctgcgttatctgaccatctgactggtaaacggttttataagtgtcactccagggagtttctgttttggaaagtctgtactcatatccaaaacctgaaagtgcatggatcgagtcggaaaaaatatcaggaacacgcaggataaatatctgttacaacaccgtccggagcaagctgtacactttcaatagaatcagatataagattttctgcaatcgtatcaaattgcttgatatctccatttccactgatcagaacctgtttcagagtatctgtgatcgcaattccatttgtaatttcatttttaatacgttcaccgtaggttgatacatttaattgtgcggttgtgcgtctctgccatttttcgtgagtgtctgttttgtatacgatgaaaccaacaaggcacatgcccagtaaaaaaacgataagaggcacaagattttttttcttcacctgtttcacctcatttttatcggatatttttatgatggaacattatagcacagaaatgaaaaaacgtaatgaatttttttcaaaacataggtacaaaaacataggcaaaatcagacaaaagtttcttagagtgaaaatgttgtagatatgaggaaaacatgttatggtatgtatacaatgcgtaaagaggagcagaaaaaatgaagtacgaacatatcacagagggccgtttcatagatcgtcctaatcggtttattgcacatgtggagatcaatgggcaggtggaaacggttcatgtaaagaatacaggcaggtgcagggagcttctgatcccgggtacgcaggtttttctggaaaagagcagcaatccggcgagaaagacagcctatgatctgatctgcgtaaataaaaagggcaggagcctgatcaatatggactctcagattcccaataaggcagcgctggaatggataaaggcaggacatcttttcccggaaaagattcaggtaataccagagaagacctacggaaattccagatttgatatttatgtctgttcagagaaacgcaaggcttttatagaagtgaaaggcgtcacgctggaatctgacaatatagcacgattccctgatgcacctacagaaagaggtgtgaagcatctgaaagagctgatccattgtatgcaggaaggatacgaagcttatctgcttctggtgatccagatgaagggagttgacaggtttgagcccaactgggagactcatcgggaatttggagaaacattacaggaagcggaaagggcaggagtgcatattctggcatatgactgtctggtagaacctgacagaatggaaattcaggatccggtacctgtatgccttgcttctgactggaaataaaaaagtattcccgcaatcagcaggccctattcaaaaattgcgatgactgccaatgcttttgaagaagaccgtaaaaaggcaatcaaggcgggtatgaacgctcatattgccaaaccaatcagtgtagatataattctggaaaatctggagagaatgcgccaaaacagaaagtattttaatgaacctgctgagaagagttaaaaacttttcagcaggttttaatttatccaaaaaattacatgcatactgtcagaagtgctagtgtaaatatctgagcgttcacgtataatgtagataaacaaaaaaacttctcacaaaattaagtaaaaaagagtccgaggagtacattaaaaaagaaaggagatgtttgtatgagtaaaaaaatgaggttgtggatggcaggaacagtaggagtcttaatggcaggctttatgagcgtaagtgtttatgcccttgaagaaaaggatgttattggaacctggtatgtaaatgagctttctatgggcgaaggtgcatcctttcatccgggggcaatgggaatggaagtgaccgtggacattaaagaagacggtaaaatggaaacaacaagttctgtttatggggaagagcccgaagtagatgaatcagagtggaaaatagaaaatgataaaattttgatgactcataatgatcagacaggggaatgcgagtacaaggacggtaagataaccttaacagcagatggaacgacaatgatcctgagtcaggaaaaggaagagtatgagccttatgtaccgggcaaaccggtagaaaatccaaccatgaaggattttgaaggagaatggagctgtactctgatggaagcatttggaatgcagatgccggttaatgctgactttacaggatttgaaatgagtatgtctgtggaagacggaaaggctgaaattatcttaatagagagcggagaagagacaaaagtagaacttcagggcgacgtggaaggaaacgcactggtattaaaggctgtaacagaggatgaggcaggaactatgtttttcagtcttgataatatgaagttcaatttactggatgatggaaaattgtgtttgatagcagaagacgatgcagaggaatctgatgacggcgaagaagcagatgattctgaaacaggtgaagttgatttttccgtaaagacatattttgaaaaaataattgttacagaataaggtaaaatactgccgcaccattccggtgaggcagtatgggttttcagataaaaaaggaggatagggtatgggattatttgataagaaaatctgtgacatctgcggagagaaaattgggttattgggaaatcgaaaactggatgacggaaatctgtgtaaggattgtgcgaaaaaattatcaccatggtttgaggagcggcggcatagtacggtagaggatatcaaacgccagctggaatatcgtgaaaaaaacaaaaaagcggtaatggacttttgtataacccgtcagatcaataccagaaattacaatgtttttattgatgataataaggggaattttactgttgcgcggaaactggatgtcaatgaaaacccggacatagttcctttatcagccattgtacagtgcagagttgatgtagatcaacagcagcatgaggaaacatatacaaaggatggagaaactgtaagttatcagccaccggtatataaatatgaatttgattataccatgcgtattaaagtgagaactcagtggtttgatgatatggattttcgcctgaatactttctctataagcagtgataacagaagggaattgatggaagtggagcagactgcttatcagattattgcggcactgacaccaaatgcagccgggatgcagtccggaatgtcaggaatgaacatgaatggaggaatgcagtctgggatgccaggaatgaacatgaatggagggatgcagcccggaatgccgggaatgaacatgaacggaggaatgcagcccggaatgccgggaatgaacatgaacggagggatgcagtctgggatgcccgggatgaatatgaatgcgggaatgcagcccgggatgtcaggaatgaacatgaatgcgggaatgcagcctggaatgaccgggatgaacatgaacggagggatgcagtctgggatgcccgggatgaacatgaatgtgggaatgcagcccgggatgcccggaatgaatatgaacggagggatgcagtctgggatgccgggaatgaacatgaacggaggaatgcagcccggaatgaacatgaacggaggaatgcagcagacgggaatgtcagaaacgaacatgaccggaggaatgcaacagaataacagttcgtggaaatgccagtgcggtgcagagaataccggaaagttttgtgaatactgtggtcagccaagaccgttttaagcaatgggaaacagagtggacaggattgttcactctgtttgtgataaaaactctgaaaatagatgattcttctgaaaactatatgataaaatggtactttatagtataattattacaaaaataggttgggtgtgtttgaaaaatcattcctgcaaattgtgacgcacatcttgcgtaaagcatttttcaaacccgctccggtaagagaggaactttcatgacatacagtaaaaagaggactctgtcatatggagtgattctgataagtgtgttgctggcttatttctgcaggcaggtgagaacggaaaatgtttttatgagaaatctggcagatcagtgtcgtagctgtatttatctgggaatgtactgtgcctgggtgatttatctgagaaaacatgtagtacataaaaaaacgcgcagatgcctgactgcaattggctgtctgatggtattctggttctttgtgcggacagtaaaatttcatatttttcatgatcctcttggagaacatatctgctggtatctatattatattcccatgattctgattccggttctgggtttggcagcagcaatgtttttgggcgaaaaggaggaagagaaaacggtcagaaaggttataattttattgaccgtggcagcgatattgatcgtaagtgtttttacaaatgatttgcatcagctggtatttcgtttttccaaacagcctccattttcggataaagattacagctatggtattgtttttatgatgattcagggatggatcttgatctgtctgacagggatggaaatcattctgatcagaaaaagcagaattccgggaaagaaacagttctggctgccagtgattccgggaatattgcttctggggtggaatatcggaaatatactccgcctgcctttcatcaaaatcattgcaggggatatgacggcagtgtgctgtcttttaatggcggcaatttttcagggttgtatattatgtggattgatacagaccaataatcgatattttgaattattccagacttccggaggactggatgcagagattacagatcattcttttcagcgctattatcattccggtgattttcctgagctgtcgcctgaactgcgtagagtcataatagacagatcatcagtacaggaacagggaatccggatcaaccatattcctataaggggaggacatttgttttggtcagaggatatttcggtactgctggatcagtatcaggatattcgggaacagcaggaggaactgactgccagaaaccgtctgttacagaaagcttatcagaaagaggctgagcggagaaagacagaagaacagaatcgtctgttaaatatgatacagaatcagactgccggtcagctggaattactgtcacagtttatggatgagctggaacggacagaatcaagggaacaatatgattggattctcggtaaaattgtagttgttggtacgtatttgaagcggagaaagaatctggtgctgacacaatatgcatcagatggaaatctgcttacaatggaagatctcagacaaagcctggcagaatcctgtgacagcttaaaattatgcaggatccgggctgcttactacgtggaaaatgtggatgtgcggctgaatgcagatgatatactaaaatgctatgacatttttgaatggcttgtggaacgattggttgataccatgcagtctgttttttaccgtgtgtcgcagattgatgatgccttgcgggtttcagttcatattgtatcagaggcggatctgcgtggattcatatcggaaaggccggaattaaaagtgcagcaggaagatgaaaacgaatggtttatcagatgtatcgtcttcagaaagagaggcggaagatgatcagttttgtggaatgcagtatggcaatacagaatgttctgatgattcttcttgaaatctgcatgattctggaattaatcctcctgttggtaagaatcacctgcttttccgggaaaaagaaaattgtaacggcagtggctgtctttgttgtttcttttatgtttatgggtgctctgatgaatgatcacagatattgcctgggagaaagttcctatcagccaatgcttcaggggtatccggtcagtgttttaatgacggtggttataggattattgctttatctttgctgggcaatccggagcgagagacgcagatattatcattctctgtcttactggtctgtgaacgaggctgtgaatgacgttccctgtggggtctgtttttcggatcctcttggaaggattgttttgtgtaataccaagatgcaggagctgagcagaatcatgacaggttcttatctgcaggattatgacgcattaaggaaagcaatgagtggggaacctgaatcgaaaggtctttgcagattgagcaaagacagtaatgtgttttattttcctgatggttccgtctggatgtttcaggaatatagtctgcaggagccggattgtgcaggatatctgcagacagtggcagttaatgtatcagaaatttattacaatggtgaaaaaatcagggcaaacaatgaaaagctggaaatcctgaatcataagctggaggaaatgtacgaaaaaatcggagataaaatcagagagcaggagacgcttgtcatgaaaatgcaggttcatgacaattttggacgaagccttctgtcaatacgcagaatattggaaaggaaagaagatccggataaaatggataaacagttgtctgcattgaaacatctggtttatattcttaccggttctgctgttgagagtatggaagaagtatataaggatacgatcagacatgcagaagagcttggaatttcagttcagatcagtgggaactttcccatgcatccatcttacaggctgctgacagacagggcaatccgtgaatgtgtgacaaactgtgccagacatgcccatggcagtactgtttgggtgaagatagacaaaaattcagatgaatatactgttcagattaccaatgatggagaggtgcctgacaaaaatgcggaagaaggcggtggtttatctgcactgagaaaggcagctgaatcaggaaaatgcaggatgcaggtttctttttcccctgagttttgtctgatattgaaaatgccactgacagaaaggatgggattcgatggtacggatactgatagtagaagatcagaagatcatgcagaagtattttgaatatattattatgcaggagccggaattccgacatgtccagacagtttcagatgcacgtgaagctgtaaaaatttgtgattattcggtaattgatcttgtgatcatggatgtgcagacgtttcataatcatgatggactcagtgccggaaaagtgatcagggagaagtatccctatacaaaggtattaatcgttacttccctgatcgatcccaaggtgctggaaagggcaaaaagtggatgtgcagacagtctctggtataaggatcacggggaagaggaaatacggagtgtgatccacagaaccttaaatggtgagcatgtatttccggatatgacgccgaaggtggagcttaactggatcacaagcggtgatatcagtcccaggcagcttgagatgcttcgcctgtatatccgtggaatgtcatattcagagattgcgcgggaaatgaaatgctctacctccggggtgagatggaattttcaggaaatgatcgccagggcaggatacagctgtaaagaagatttgatagcggctgcactggaaagtaaactgatcgtaactacgttaaaatagcaagctgataaactgcgaagttattctgttatgagcagaaagcgaagcggagtgcaaatatccgtttgataagaagggagatgagagtatgaaaaaatattcgattgctgtatgtgtttgtgcggtactgttttctgttggtatccatggcggaggtatgagagaagtatttgccagagcacctggggcagatgagaatctggcaattctgcaggacattatcagggaaaatgaatgtcaggccggaatggcatttctgggatatacctatgaaggtgcagaggcagcagagatacttgaatataccagacagggagaagtggcagctgcgtatccttttttacaggatggaacagtggttgatgcagggggatatgaaatttatgctgttgtcccgggggatgattgcagggtcagtgtttatccggctcagcctacggaagaaggggaatatctggatgatctgaactctccatactatagggggcaggagaatgaaatcattatcctgcgctgcaatgtgagtgagattcattccaatgtgatggtttctgtacagaagcagaatatgagtgtacaataccatcctatagtgtcgttaaaggatggacatcttgcagcagaaacccactgctatgatttctccatatattataattgggatgagtatgatccggaatataatccggtgtatgagtcagagtatgattcagagtgtaatccggagcatgattcggcattgaatataaagattgccagagaacagctttctaagacagatgaagtcagctattaccttggtcttgggatgtctctgtggtatacagatactgaggagtacattgagggaagaaattgtccggtatttgttctgggaacggatcatgaggatcattttacaaaagaacattattatgcagtaggagacaatgtggtttattattatgatccgtcaggtgatgcatggcttctgctgggggcaggctgacagaagcttcaccaatatatcatagaattttgattaatcagagaaagaggaaacagacatgaatgattttttgacagaaaaaaataaaaaagcaggggtgttgggaaaactgaagtgggttctttgtggcttctgcatacttttatccctgggagctattggtgcatcggagaagtatattggtgaaggacgttggggaatggcagcaacagaaatcctgctctgtctgttatttttatatccgactttcagggaagttcagaaagcattacggaagaaaaaagccagggaaattgcctgctggtttgaatcttatgctcagaatacggtctcatttgagaaacttgagcaggagctgggaaaaggtgcagtaaaaaaactggaaaaatttattgccaggggatatatccggaatatccagatagacagagaaggaaattatattatgattactgcaccaaacagacgtgtaaatgaaaagatttatattacagttacctgtaccagctgcggtgcaaagaatcaggtaataaaaggacgtctgagcaattgtgaatattgcggacagcgtcttaactcatgatacaagtactgtgagagaggattatcaggagtgttcataaaaaagagaatgaattttggctaagttactgtgaatggagtgaacagtaacactattccatcgccgaaggcgatttctaaagatttgagtttgagagcgtaactgtgtgaaggcgttaaatcgtcatggttgctatagaatatggtatattgtatacaatttgctaatttcatatcttttacagtacaaatatctgcacttcatagaattttaggatgaaatcatagaagaaatttataaaatttgctaataaaactggataaaatgtgcattttatgttacatttaataaggtatatgtattgaacttatttatctggttttattagcccttttttgagtgcagagatggagggaacggataagaacagatatcataaggataaaattttatcgtgaggaaggtgagcaattggaaaactatactaagtacaaactgaaaagcagtgatgaacttgcatcagtgcttgacggtaaggacaacctgtttgtgattgcctgcaacaaatgtttcaaagaatttgaaactgttgacgaaccggattgtgacgaatttctgaaattcgctgcagatcagggaaagaatgttacaggcagtgcaaaatttgatttcttatgcaacaagatgcacacagaaagaaaattacaggatctgattccggaaggtacagagaatgtagtagtaatttcctgtggccttggtattcagaccgttgcggatctggcaggtaagccggtagttgctgcaagcaacacccttaactacagaggtcatcatggcatggcacttaccaagaagagctgtgacgcatgtgcgcagtgttatttgaacattaccggaggtgtctgtccgatcgttgactgttcaaagagtcttgtcaatggacagtgcggtggagcaaagaatggaaaatgcgaagtagatccgaataaagactgtgcatgggagaagatttaccagagacttgcaaaacagggacgtctggaagaattcttaaatcagcctgtacaggttcgtgatttctccaaagttaatttcaaagtgatcaacgactatgtgaagtccatcagagaagaaagactggacggatattacggcggtgttcatccgtcagaacgcaaggaattcagtgagcacatcgctctgaagaaattcccggatccgaagacagttgtaatctccatgtcacagcatctgggcgcaccggctaatccgatcgttcaggttggtgacactgtaaaagttggtcagaagatcggtgaagctgccggatttatcagtgctccggtacattccagcgtaagcggaaccgtagttgctgttgaaccgcgtatgcatggcacacgtggaagcgaagtgatggctgttgttattgaatcggatggaaaaaatactctgcacgaatccgtacagccacatggtgatcttgacaatcttactccggatgagatcattgatatcattcgtgaagccggaatcgttggtatgggcggtgcaggtttcccgacctgtgtcaaacttaaacctgcaaaaccggtagataccatccttctcaacggatgtgaatgtgagcctctgttaacagcagaccacagagtactccttgagtatgcagatgacattatttttggcctgaaagcagtccttaagacaacaggtgccgagaagggtatcatcgttatcgaggacaataagccggatgccattgaattaatgcagaaaaaagttgctgacatcggaaacatggaagtatttgttgcaagaaccaaatacccgcagggcgctgagaaaactctcattaagcgagttatgggaagaattgttccaagcggcggtcttccggcagatgtcggcgttgtagtagataatatcagtacagtaaaagcaatctccgatgcgatccagacaggaatgcctctggttgagcgtgttgctacagtaacaggcgagaagatcaagaatcctggaaacttcgttatcaagatcggtacaagcgtaagagagctgatcgattactgcggcggatttacagatgacgatgttctggttaagatgggcggaccaatgatgggattccctctgaacacactggatgtaccgatgatgaaaggctccaatggtatcattgccgttgaaccggatgagacaaaagaacagccgtgtatcaagtgcggacgttgtgtagatgtatgtccgatggagctttcacctctgtatttcgtgaaatatgcgaaagatgagaactggcagggcatgaaagacatgaacgttatggattgtgttgagtgcagatgctgtcagtatatctgttcttccaagattccgatcattaacagtatcaaagccggaaaaaatgcagtaagggggatgaagtaatatgttgattacccagttaaaagcaaaagaagcgattacatcactgacagccggaaagaaagtcttcattatcaactgtcatggatgtaaagaagttcgttttccggaaaaagaagctgcccaacttcagaaggaacttgctgctgaaggaaatgtgacaggaatcatgacaactgattacatctgtaatccggaaaatatggaattacgtcttaagaaacatatgagcaagatccaggaagcagatctggttctggtattctcctgcggtgttggtgtacagaccgtttcagaatatctggaagacaagatggtctgtgcagcctgcgatacatacccggtacctggtttccagggcgtgacaccgttagagtacaaatgtgaccagtgcggtgaatgctacctgaacctgacaggcgggatctgcccgatcacagcatgttcaaagagccttgtgaacggccagtgcggtggttccaagaacggtaaatgtgaagtggacagcgagatggaatgtggatgggaacgcatctacagacgtctgaaagagattggacgccttgacgcgctgaaatgtccgacacagattcataactttgcaacagacgatgaattaaaatagattataatgattggagcaatgtacaatgaaaatgaaagaattattcgaccgtggtgaatttgtagtttctgcagaagtaggaccgccaaaaggaatccacgtagatgagctggtagaagaagcaaaaacataccttaaggatgttcatgcagttaacgtaactgataaccagtcttctgttatgcgtcttggatctcttgcaatgtgtaaggttctcaaggatgcaggcatgaatcctattttccagcttgcatgccgtgacagaaaccgtatcgctctggagtctgatcttctcagcgctgcaatgctgggcattgacaacatcctctgccttacaggtgaccatacaaagatgggtgaccacccacaggcaaaacctgtattcgaccttgactccgtatcccttcttcacacagtgaagcttctggaatccggtgtggatcttggtggaaacgaactggttggtgagcctccgaaattctccaagggtgctgttgtatctccgtgcagcgattccgttgacgcacagcttgcaaaaatggaaagaaaagtagctgcaggtgcagaatacttccagacacaggcagtatttgagccggagaaattcatcaaattcatggaaaaagcaaaacagttcggaaaacctgtacaggttggtatcattattcctaagtccgctggaatggctaaattcatgaacaataatgttgccggtattcatgttccggacgaaatgctcgaggaactgaaagcagacaaagaaaagacaaaagcaggtatcacaggtgttgagattgctgcacgtattatcaaagagtgtaagccatactgtcagggtgtacatatcatggcacttggctgggaatccaagatcccggatctgctgaaactggctgagatctaagaaaataaaactctgagctgtaaatagtaacatcattacagaacagtactgcaaataattaaaaaagctgtctggattccggatgtatttgcatccggaacagacagcttttgttgtatcagcatctaacccttaaccgcacctgcggaaacaccttctacaatgaatctggaaagaagaatgtagacaatgatgaccgggaagatggaaaaggcgatcattacatacacctgtcccatgtcaaacttcaggaagtctgcacttcgaagctgtgcgatcagtacaggaagtgttttctttttatctgagtgaaggaccagcgccggaatgaagtaattattccagctctgtacaaaggtaaaaattgcctgcacagcgatagccggtttcataagcgggaatacgattttgttaaaggtattaaattcaccggaaccgtcaatacgtgctgcttccacaagctccagaggaaggttgctttccatgtactgtttcatatagaagaaagtaacaggagcagcaatacttggaacgatcagtgggacaaaggagtcgtccagacctatttttcccaacagctgaaggaatccaagagcagttacctgagttgggatcatcatgactgcaaggataaatgtaaacataaatttttttgctttaaaattgtatgcatggatagcgtaagcagtcattgttgaaaaataggtacataaaacagcggagcaggtagcaatgaaaatactgttgaacataccattccatacagggagtgttcctgcgagaagatttttccagttctcaatgagatgtcctccgggaatggctgtgaatccctttttcagtgcgccattagatctggtggcattgataaacagtacataaaaccagaacaggcagaagaaggaaatgatgatcagtacgatataggcaagagtacgctgacctttcatgctcattccttttttatttttggagtttttttcattcattcttctcacctccatcagtcttttatcttgttaaagcggaatacgatcaggctgagcactcctgtgataatgaacaggaatacggataatgcgccacccattccgtagttcttgctgaacagatgcttgttcaggaacatgatcagtgtcatagtggaacgcatggggtcgccggttccgtttgtcaggatctgaggtacatcgaacatctgcatgccgccgatcagggatgtgatcataacatagatcaggattggacgaaggagtggaagagtgatctttctgaaaatctgtgaggaagttgcaccgtctacttcagctgcctcgtaaagcgaggagtcaattcccatcatacctgccataagaagaatagttgtatttccgaaccacatcaggaagttcaggactgcaacaagggttctggcactccaggcatggctgaaaaaggaatatgcctgtttcagtattcctgactgcatcagcattgcattgatgggaccgccgtctgcaaataaggtaaagaataacattgcaaaggcggatgccatgatcaggtttggcagataaataactgttttgaagaagcgctgtcccttaagccggaggcttggattggagaaccaggcagccaggagcagggaaaccaggatctgtgggataaatcccattacccacatgatcattgtgtttttaaaataaatccagatatcgccaccctgaaagagctttgcataattggcaagtcccacaaaattcggtcctatctgcgttaatccagatctgtaattttcaaagaaactgttataaattgtactgataagcggaacgagctggaatatgagatatactactacaaatggtatcaggaagatatatccccatttgttatagctgaccgctttatggttattattctttgccattatcttcctccatagtctgctgtaatccaaagtgtgcctgcctgatggtcaggcaggcacacaggtttcaatgtttgattaataggaaagttccggatatttttctacaactgccttatagaacaggtcgagagcttcatcataagatgcgttgccttcgaagtagttcttcatggcattctggaattcttcgttgcagccctgatcatagatactcatgttactcagatcaatcttatcagcgcctgcacagaacatagccagaggattctgtccaccaagaactgcatcgccgtagctttcatctttagccatttcttccatggcaggtttattgtttacgaagtcattatcagcagtaacgatttctttcataacgtcaacgttagttgtcatcgttctcatgatatcagcaaccagtgtgggattgtctgtgcctgtagctgctgtgatccatgttccgccccagtagaagccctgtggcccttctgttgcagcccagccgccatctttaccaactgaaccatcctggtcagcgctcatggagaagtcgatgaaccatgcaggtccgaaatatgagaatacattgctgtctttgaagaagcccttgctccagtcatcactccacaattcataggtagctgtttctccggcatcaaccatttccttggacatatctacccagtttttgatattgtcatcaacagtgatctttccgtcaacaacccatggggaagttacattattagagaatacacggtaggcatcatttacagtggaagtcatctgatagcctttttccttcagctcttcagctgttgccttaaatgtatcccagtctgcaactttcttctgaacctctgccggatcatcgcttccgaatacttcttttgcaatatctcttctgtagatcatagcacccgggcagccctgccaggaaagaccttttaagttgccatccgaatctgtcataacatctttggtgtactgatactggtctgcaacttcctcatctgtgattcccagatctgccacagacattgtataatctgtatttacatatttcagtgcataatcggcttcaacaaggaagagatcgattttgtcatctgctgctgcatcagcctgtttcagaagagtctcatccagattattctgatatgcattgtcatcagaaggagtaatgttccatacaacatcaacatctccgatcttgccatgagttccgtcaacttcttcatatccgggatagtggtcagtcagacgggatttgaattcttcattccagcaataaatgtttaaaactttaccttcgtcagcggctgcatcttcagcccatgttggaactgctgtaagaccggcaagcatagctgctgttaatgtaattgccatagcttttctcttcatcatgttattacctccttgtgataattattttgggttgattgtaacttttcagcagtccaccaactgtgaagatactgaagattttcttattttgccagatttctgactgatgcaccggggaaaagtcttccatcaacggtgaatttatcgatgatcgttgttttaggattttcgataagatcaatcagcttctgtgcggcaagccgtccaatcgtttctgtgtcctgacacagagttgtcagccgtggctccaggatgcgtgcaaaagtaagtccgtcatagcctgcaatggaaatatcatctggtattcgaagtccacgttcgtggatttcattgatgccacccagtgcggagaagtcatccggatagaggatacaggtaggaggatctttcagatccagaagctctgaagttgctattgctgcagcttctgcatctcgataaggaatgactggcatatattcatcaggtatatcgattcgttttttctggagagttctgtaaaaacttccaagtctgtttcgtgtgacagaggaatcttctccgtgaatataggcaatctttctgtgtccccgttcaagaatataagagacaagttcttccattccctgaatgttgttggaaacaacagcaattcttccatcaaatacatgatcgatagtgactaccggtatctcggactgtaccaggcgctgtacctcttctgtaaaaaaattgatacaggcgatcaccactccatcgactccacggtaacggcagtgctcataataactgagatgctgaccggagaggtttccgctggtaaaagtgatgtcatatcctctggattcggcagtgcgtttaaagctttccagtacatgattgaaataatcatgggtgaggccactcatggcttcgtctacaaaaagtacgccaagattataactgcgtctggtctttagtgctctggctgaggaatttggaagatatcccatttctgatgcagtcttcaaaataagctgtcgggtttcttcgctgatatccgaataaccattaagtgctttgctgacgcttgcaacagatacgttacattgttttgcgatgtctttcatggataccatattatagtccagccttttctgtttttgtttctaaaacgttttcgcaagctaatcgtactttattttcagataaaattcaagtatttttgttatatttgtataatttatccctgttgcacaaaaaagaatttataataatttattaatttcacaaaaaacaggctttaatataacgaaaagtttcgcgatgatcttacggaagttaaaataacagttgtgaaatattttgactgctaaaaatgtagttgatttttttgaaaaactgaattatactgtgataaatccaatctaaactatataataaacatataaattctgaacgtattcgttttcgcaagtctgttttcggccttttcttcacaagtgtttatttattctttttaaggaggcttttcaatgaaattcggatattttgacgacaaggcgaaagaatatgttatcactacaccacatacaccattaccctggatcaattatctgggaagtaatgatttcttttcactgatctccaacacctgcggaggatatagcttttataaagatgcaaaattgttgcgaattaccaggtaccgttataataatattcctgcagattccaacggaaagtattattatattaatgatgacggagtaatctggaatccgggaactatgccgtctgcaacagaaacagatacttatgaatgcagacatggtcttggatacagtcgcttctgttcttcgaaaaataatctaaaagcagagcttctggtttttgtgccctctgatgcttcatgtgagatcaattgtctgaaactgaaaaataactctgaaactgaaaaaaatatttctctgttctcatacgtggaattctgcctctggaatgcagtggatgacgcatcgaacttccagagaaatttaagtatcggagaagtggaagtacaggggagtacgatttatcataagacagaatacagagaaagaaggaaacattacagtttctttacagtaaatacacaggtggacaattatgataccaacagagatgcttttctgggagcaggaaacgggaatgcttttccagaagctgtatgtaagaaaaaatgcagtaactctattgcaagcggatggtatcccattgctgcacatcagatagatctgactctgctgccgggagaggaaaaagaatttgtttttatgctgggatattgtgaaaatccggcagatgataaatgggaagctcccggaattatcaataaaacctctgcaaaagcattgattgaaagatttaatacaatggaaaaagcgatgcaggcctttgcagaactgaaaaattactgggaaacattgctggcacgctttgcagtcgtcagcgagaacgaacatattgaccgcatggcaaatatctggaatcaatatcagtgtatggtaaccttcaatatgtccagatcagcatcttattacgaatcaggaacaggacgggggatgggatttcgcgattcttgtcaggatcttctgggatttgtgcatcttatcccggagcgggcaagggaaaggattattgatatagcatctacacagtttccggatggaagtgcatatcatcagtaccagccgctgacaaaacaggggaatctggatgttggaagcggatttaatgacgacccgttatggctgatcgcagcagtagcagcatatatcaaagagactggtgattatgggatacttgatgtgcaggtaccctttgattgtaagaagggtacagaggtaccgctttttgaacatctggagaaatctttttattacacagtaacccatcttggtcctcacaaacttcctctgatcggaagggcagactggaatgactgcctgaatttgaactgtttttccagtgaacctggagaatcctttcagacaacagggccgtcggaaggccctgtggcagaatctgtatttattgcaggtatgtttgtgaaatatggaaaagaatttgaggagctctgtgagcggaccgggcacacagaacttgcaaaagaagcagggaaagcagtggatgagatgtatcaggcagtgctggataatggatgggacggagaatggttcctgcgtgcctatgatgcacagtctgaaaaggttggttcaaaagaatgcgaagaaggaaagatctttattgaaccacagggattctgtgttatggcaggaatcggcaaggaagaaggaatagcagaaaaagctctggactctgtgaatgaattgctggaaacaaagtatggaataatgatccttcagccggcttatacaagataccatctggaacttggggaaattacttcttatccgcctggatataaagaaaatgcaggaattttctgccacaacaatccgtggatttccattgcggagactgtgcttggaagaggaaacagggcatttgaggtttatcgtaaaatatgtccatcttatattgaggaaatcagtgatattcaccggacagaaccatatgtatattcgcagatgatcgcgggagctgatgcaccaggatttggagaggcaaaaaacagttggctgacaggaactgcagcgtggacatttataaacctgtcacaggcgcttcttggtattctgccaggatatgatggtttgatcgtagacccctgccttccggaaacgtttggcgattttaaagtgaaccgtcattttagaggggcggattatcatattgagatccataaaccgaaaggtgtgcagaaaggagtcagatggattgaggtagatggtgagaggataaatggaaaccagattcctatggtcaatggcagaaacgaataccatgtaattgtacagatgggataactgataaataaaagtccccacccattgcttattgcctgatgcaattaaagcagagggtggggacttatttgaacaggttaaagtaaaatacctgttttatttattttcttcctgaacttcgattttacgaattgtcttgtttttgatttcttctttgatggatgtaaggaactcaccaaggtctttcattccttcgtcgccaaggtaacggcttcttacggaaaccttgccttcttcttcctctttggcaccgacgatgagcatatatggaactcttgcaagacgtgcttcacgaatcttgtagcccattttctcggaacgctggtcaacggagcagcggattccgttttcttttaactgtgcttccactttggcggcatagtcgtggaatttctcagagatcggaattacacgaacctgttctgggcagagccaagtcgggaacatacctgcatatttctcaatcagccatgccagtgttctctcatagcatcccatggatgtacggtggatgatgtatggacgctgtttctcaccattttcatcgatgtagtacatatcaaactgttcagcaagaagagcatcccactggatcgtgatcattgtatcttcttttccgtatacatttttggcattgatatcaaccttaggtccgtagaatgcagcttctccaacatcctctgtaaatggaatgttcagttcttcaagcatctggcggatatgagcttctgtctgattccacacttctgcatcaccgatgtatttctttctgttgttcggatcccatttagaaaggtgataggttacgtcctcttctacaccaagaacctgcaggcagtactgtgcaagtgcgatacagtctttaaattcttttaccatctggtcaggtcttacgatcagatgaccttcggagatcgtgaactgacgtacacgtgtcagaccatgcatttccccggaatcctcattacggaacagagtggatgtttcaccgtaacgaagaggcagatcacgatagctgtgctgttctgctttgtatacatagtactggaatgggcatgtcataggacgaagcgcaaatacttctttgtctgtttcttcgtcgccgagaacgaacatgccctctttgtaatgatcccagtgtccggaaatcttgtagaggtcgctctttgccattaacggagtttttgttctgatatatccgcgttttgtttcttcgtcttcaatccagcgctgaagctcctgcatcatgatcacaccgtttggcatgataagtggaagtccctgaccgatcacgtctacagttgtgaagatcttcatctcacggccaagtttgttgtggtcacgtctttttgcttcttccatctgttccagatgttcttttaactcatccttggaagcataagctgttccgtagatacgtgtgagcattgcgttcttttcgctgcctctccagtaagcgctggaggaggagagaagcttgaatgcttttacaccctttacactcataaggtgaggacctgcgcagaggtctgtccagtctccctgggaatagaaagagatttcggagccttccggaagatcttcgataagttctaccttgtatggttcatttttctcctggaagtatgcgatggcatcttctcttgattttgtgaagcgttcaatcttagcgccttttttgatgatctttttcatttctttttcgattgcatccaggtcatcgcgggagaatggagggcagtcgaaatcatagtagaatcctgtatcaatagaaggtccgatagcaacctttgcatccgggaataaggtctgtactgcctgggcaagtacgtgggatgctgtatggcggagaactgcaagtcctttttcatcttttgctgtcaggatgtttaattcgcagtcactgtcaataactgttctcaggtctacaacttctccgtttacttctcctgcacaggcagcacgtgcaagtccctcgctgatgtcgtaagcaatgtcgattacagattttgcttcagcgtattctttttttgagccgtcttttaatgttacgatcatgatgattatctcctttacgttagtatggatttgttatagttgctgttcactgttgatatcccgcggagcgtgttgttgagaacggagtgaacagtaacaggtttttgtactgcgaaggggtaaaagaaagaataaaaaatcccctacagtacggttaaatactgtaggggacgagataacattactcgcggttccaccccggttgttctgatacattactgatggataaatcatctgatcagaaccgcttcattcgatggtaacggaatcaccggactgtattaaagtcactcagaggtggtcttcggctggtttgcgatgaaatgcttgcaccggtatacatttctctctgtaacgttcctcagcgtactcttctcttcaacgttttgatccttcttatcttttctgccgcttattataaacttgcaaagtgggtttgtcaatcagtaaaatgcaaaaagttgatttacgaaaatagagattaatgttatactgacgaaagtgaaaaacaataaaaaacatgaaaggaatcagataaatgagcagatgggaagaaaatatacgtaaagtaataccatatacaccaggcgagcagcccaatcagccggatatgatcaagctgaataccaacgagaatccgtatccgccggcacctggagtggagaaggcgttgagggagatggatacagatactatgagactttatccggatcctacagcaggagaactggtacatgccattgcaaagaattgcgggctgaaggatgaacaggtttttgtgggagtaggttccgatgatgtgcttgccatgagtttccttacattctttaattcacagaagccggttctttttccggatatcacatattctttttatgatgtatgggcagacctgtttcgcattccatatgagagaccggcactggatgagaactttcatataaggaaggaagattatttcagagaaaacggaggaattgtattcccgaatccgaatgcgccgacaggtgtggagatgccgctggaggaagtggaggatattatccgccataatcctgatgtgattgtgatcgtggacgaggcttatgtggattttggtggtcagtcggcgcttccattgattgaaaaatatgacaaccttctggtcgtacagacattttccaagtcgcgttctatggctgggatgagaattggttttgcgtgtggaaatgagaaactgatcagattcctgaatgatgtgaagtattcttttaattcttatactatggaccgtacagcgattgctgcaggtgtggcggcagttgaagataaagcatattttgatgagacatgtaataaaatcatagagacaagagaatggacaaagaaagaattgaaggcactgggattctcttttcaggattctatgtctaactttatttttgctacgcataaaacctgccctgcgaaagaactttttgaggcattgagagggcagcatatttatgttcgttacttccagaaggacagaattgacaatttccttcgtatcacagttggaacaaaggaagaaatgcagaaatttattgattttttgaaggattatctgaagtaaaagttaggaggttttatggaagcactggtacattggttctcgcagaatctgtcacaatatatttcaccggaaggggcagtttttattatttcaatgattccgcttttggaactcaggggaggattgcttgcagcatccttacttaagatatcggctgcaaaggcaattccactgtgtattgttggaaatattattcctattccgtttattctgttgtttatcagacagattttcaaggttttaaaaaagacgaaactctttcggggacttgttatgaaattggaagacagggcaatgagaaaaagtgatcaggtaaagaaatatgagttttggggactgatgctgtttgtgggaattccgcttccgggaacaggggcatggacaggatcgctgattgcatctcttctggaaattgatattaagaagtcctctctggcaattttttgtggcattattatggcaactgtcattatgtatattgtttcttatggattagtgggaaatctggtacattaattgtcttcttaaataagtgttattaatatctgatttaccggaaatccggggacatattttatgtctccggatttctgcttttatgtcgataatatcagttttatgacgtataaaacagcttgccaataataaagatttggaataatatggtattgtcaattatgaagaagatgtgctaagataaatataaagataccggtgtgcagacaggattactacagaaattaacttgtcgacacaggagcaggagtataattttcctgcgatatgcattgctgcagatctgatattcgtgtcacttcagacagattatcccactaactgttacaggaaaagttaataaagaataaattgctcagatacataggaaatcaaaaaaacaaaaataaaaataattatcaatattaacaatcaaaacaaaaagcagaggattattttatgagagaaaagtatgaatcattatcactggcaactttaaaggatttggcaaaagccagaggattaaaaggggtttcagcattgagaaaaccggaattgatcgagagaatgcttcacgaagatgaactggaaggtgagacaaaaaaacaggaaacagtccgggagaaaccgcagcagagtgaagtggaaggtaacggagagagaatcccccagtataacaaaacaccggaacgtacacagtatcatgccccggcagaggcagtacagcttgacagtggagagagagcagacggaatccttgaggtacttccggatggatatgggtttatccgatgtgagaattatcttccgggggaaaatgatatttatgtatcaccttctcagatacgcagatttaacctgaaaacaggtgatattattaaggggaatatccgtatcaaaacacagggagagaaattcagtgccctgctatatgtgacctctatcaacggattccatcccagtgaagggcagagacgatataattttgaagatatgacaccgatttttccaaatgagagactgataatggaaagaccgggcggcacagttgccatgaggatcgtagatctgatcagccctatcggtaaaggacagagaggaatgatcgtatctcctccgaaagccggtaagacaactttgctgaaagatgtggcaaagtctattctgagaaacaatccggacatgcatctgatcattcttctgatcgatgagcgtcctgaggaggttacagatatcagggaggccatctgtggcgataatgtggaagtcatttattctacatttgatgagcttccggaacatcataaacgtgtgtctgaaatggtaatagaacgtgcacgtcgtctggtggaacataaaaaagacgttacaattcttcttgattctattacaagactggcaagggcatacaacctgatcataccgccgagcggacgaactctttccggtggtctggacccggcggctcttcatatgccgaaacgcttttttggtgcggccagaaatatgagagagggcggaagccttactattcttgctacagcgcttgtggatacgggaagtaaaatggatgatgtaatttatgaagaatttaagggaaccggtaatatggaactggtgcttgaccgaaaactgcaggaaaagcgggtattccctgcaattgatatccagaaatccggtacaagaagagaggatctgctgctgagtaaagaagaacaggaagcggtttacattatgcgaaaagctctcaatggaatgaagtcagaagatgcggtagaacagatcctgaatatgtttacccgtacgaaaaataatgctgaatttgtgcagactgtaaaaaaacagaagtttatctgaaacgttgtaaaaaaacagttactgttcgctccgttctcagtaacaaaaatattaaataaattttaaaataaattttaaaataacttgcattccatgggacgatatgttatactcataaagctgtttaatagtaaattcgtcaaatgaatacgaatagaaaatagaatctttacagagaggtgaaaatcatgagagaaggaatccatcctaattattatcaggcaactgtaacctgcaactgtggtaacacattcgtaacaggatctacaaaacaggacatccacgtagaaatctgctctaaatgtcatccattctatacaggtcagcagaaagcagctcaggctcgtggacgtatcgataagtttaataagaaatacggcctgaacaaataatcagaatatagtaagaattgagaaggttgaggttgggaaatctcagcctttcttgtttctttgggagaaatataatgaaatcatcgaacatcggcggtcaggctgtaatggaaggcattatgatgcgccataaggataaatattccattgctgtccgaagaccggacaatgagattgaattaaaagtagaagattacaaatgtgtattcggaaatgcaaaatttctcaaatatccactgattcgaggtgtggtaagcttcgtggattctctggtggtcggcacaaaatgtctgatgtattcagcggagattgcaggggatgaggaggacgaagaggataagcagaagaatgctgctctttcagaagaggagcttgctgcaaaaaaggcaaaagaagataagcagttcaaatggctgttatatgtgacagttgctgtctcaatcgtggtatcagttgccgcctttatgctgctgccatacgcccttgcaagtctttgcagaagggttggcgcttcggaatttgcagttacaatagttgaggcatttgtaaagcttgcattgtttatgggatatatgcttctgatttccagaatgaaggatattcagagaacatttatgtatcatggagcagagcataagtgcattaactgtgtggaacatggactgccgcttacggtggataatgttcttgcaagctccagactgcataagagatgtggaaccagttttctgtttctggttatgctggtcagcatttttctgcattttatttttgtattggttccattttactgggtgagactgtttggaagacttcttatggtgccggttgtagcaggaatatcttttgagattattcagtgggctggaagatcagacagcaaacttgctgactttttcagtaaaccgggtctggcaatgcagaaacttacaactaaggaaccgacagcagatatggcagaggttgcaatcagggctgtagaggcggtttttgactggaaagcatatctgaaggaagaatttggagttgaagcagaacaatgaacggagaaactctgacaggattattaaaaaaaggacagatgatccttgcacaggcggggattaaggaagccgggctggatgcctggcttctcctggaatatgtcacaggaaaaagccgggcgtattattttgcatacggagaagaaagtgtcacagaaagtgttgctgaaagatatctggaactgatcagcagacgtgcgggacacataccgctgcagcatctgacgcatcaggctttttttatggggcatgaattttatgtggataagaatgtactggtacccagacaggatacggaaacacttgtggagtccgctcttgaatgcatgaaagctgtgaaaaatccatatattcttgatatgtgtacaggatccggctgtattcttatcagtattctgaaggagagagctgatgcacacggaacaggcgtggatctgtcagatgaggcactgaaagtggctgtgcggaatgcacggacactggaagtggcagagcatgcggaattcgtacagagtaatctgttttctgaaatgcagaacattgtgtacggaacagagtatatgaaaaggactgctgtaaaagatactgtaaaaatgacagaatgcgaaaatagtaatagaaattatagcagagcttatgatatgattatatcaaatccgccatatattcctacggcggaaattgaagatcttatggatgaagtaaaattgcatgatccgcgtatggcgctggatggtatggaagatggactttatttttacagggctatcacgaaacaggcacaggatcatcttgttccgggtggctggcttttgtatgaaatcggatgcagccagggagaagatgtggcagctcttttgcggaaatataaatttgaagatattgagataaggcaggatctggccgggttggaccgggtggttctggggcgaaagaaattacaggaggataaatatgtttgataaattagacgatctgctcattcgttttgaagaggtgcttaatgagcttggagagccgggagttaccgataatcaggaacattttcagaagctgatgaaagagcagagcgatctgcagccgatagtagatgcttaccgggagtacaagaaaaacaaagaaacaatacaggacagtctttccatgcttgaggaagagaaagatgaagatatgcgggaaatgctgaaggaagaactgtctgaggcaaagaagaatgtagaggaactggagcatgaacttaagatccttcttcttccgaaagatcctaatgataacaagaacgttattgtggagatccgtgcaggtgcaggtggggatgaagctgccctttttgcagcagagatttaccgtatgtatgtgaaatatgcagaatcccgccgctggaaaacagaaatgatgagtctcaatgagaacggaatcggcggatttaaggaagtaacatttatgatcacaggtgcaggtgcttattccagactgaaatatgaaagtggtgtacatcgtgtacagcgagttccggaaacagaatccggcggacgtatccatacctctacctgtacagttgctattatgccggaagcagaggaaatcgatttccatctggatatgaatgactgtaaattcgatgtgttccgtgcatccggaaacggtggacagtgtgtcaatacaacagactctgctgtgcgactgacacatattcctaccggaatcgtaatttcctgtcaggatgagaagtcacagcttaagaataaagataaagcactgaaagttcttcgctcccgtctgtatgagatggagcttgccaaacagcatgatgctgaggctgaggcaagaagaagccagattggaacaggtgaccgttcagagaagatcagaacttataattttccacagggccgtgtgacagaccacagaatcaaactgacactgcacagactggagaatgttctgaacggggatctggatgagatcattgacagtctgatcgcagcagatcaggcagcaaaattaagtaatcttcaggatgcggaatagaatattgcggagagggtatgtgacagaagatgactgaaaaagtattgatatgagagaagaatgtcaggaggaaaatatttatgcagaaaacagcacttgtaattatggcggcaggaatcggaagtcgttttggaaaaggaatcaagcagcttgcaccggtgggaacatgtggagagattattatggattattccatccacgatgcgctggaagccggatttaacaaagtagtgtttattatccgtaaagatctggaagaagagtttcgcagagtgatcggcgagcgtattgagaaaattacggaagtagaatatgtattccaggagcttgatgatctgccggagggatttacgaaaccggctgaccgcacgaaaccctggggaaccggacaggctgtacttgctgcaaagaaggttctggatgagccatttattgttatcaatgcagatgattattatgggaaagaagcttatgtgaaggtgcatgattatcttgtgcaggaacagcaaaaggacggaaaactccacatctgcatggccggtttcaggcttggaaatacattgagcgataatggaagcgttaccagaggaatctgccatattgagaatggacagcttacaggtgtgacagagacgcatgatatatttaagactgccacaggtgcagagtcaagaaatgcggacggaagtgtgcaggaactggatgtaaaggatctggtgtccatgaatatgtggggactgacgccggactttatggaggtcctcgagaaaggatttgcagaatttctcagtggactcgcaccggaagatacaaaaaaggaatatctgcttccggagttagttgaccatctgatcaaaaatgaaagtgctgaagttgatgtcctggagacaaaggatacatggtttggtgtaacctatcaggaagataaagaaacagtaatgagagcatttaaaaatcttacagaagcgggtatatatcctcagggactttatcaataagttaagcagatatctgcagctttcgcaggagacatgtctgatctgattaaaagcagttttgggtgtgatccgggaaatacagtatgcagtgcagaaacagaggatattgtaaaaagtaaaggagagcaattatgggaaaatattttggaacagatggatttcgtggagaagcaaatgttaaactgacagtagatcatgcatttaaggtggggcgctacgtaggctggtattatggaagagaccataaagctaagattgttattggaaaagatacaagaagaagcagttatatgtttgaatatgcacttgttgcaggtctgacagcgtccggtgcagatgtatatcttcttcatgtaacgacgaccccaagtgtttcctatgcagtacgtacagaggattttgactgtggtattatgatctccgcaagccataatccattctatgataatggtatcaaacttctcaatggaaacggacagaagattgaagcggaagtagaagcaaggattgaagcatatctggatggcctgatcgaggatcttcctctggcaactaaagaagatattggacgcactgtggattttgcttcaggaagaaatcgttatatcggacatctgatctctattccaagcagggatttcaaaggcattaaagtagggcttgactgtgcaaacggaagttcttcagctattgcaaagagtgtatttgaggcacttcaggcaaagacttatgtgatcaataaccagccggatggtacaaatatcaatacaaactgtggctctacccatattgaagtcctgcagaaatatgttgtggacaatggattggatatcggttttgcttatgatggtgatgcagatcgctgtattgctgttgaccataagggaaatgtggtcgacggtgataagattatgtatgtatgtggaaaatatctcaaggagcagggcagattaaaagatgatacagtagtaaccactgttatgtcaaacctcggtctgtacaaatctctggagagagagggtatgaaatatgagcagactgcagtaggagataaatatgtggcagagaatatgatggagaatggatacagtcttggcggtgagcagtccggacatattattttcagccgttacgctgcaacaggtgatggaatccttacttctctcatggtaatggaagcgtgtgtagagaagaaagcaactctgtgtgatctggcaagggaaatgaaggtttatccacagcttctcagaaatgtccgggtggcagacaagaagactgcgagagagaatccgaaggtagttgctgctgtagaggaagttgcaaagaaactgggaagtgatgggcgtattctggtacgcgagagtggcacagaaccattgattcgtgttatggtagaagccggaacagatgaactctgccttgagaatgttgatcatgtagtaaaggtaatggaatctgaaggattgctcattgactgatttactggcaaaggaattacatgtataacagaaaaaaaagattatttctgactgctgtctgcttaagccttggacttctgacaggctgcaatgtgggaaatacaaagaattataaacaggctgcacaggatctggaacagggaaattatgaggcagcacttgaagaatacgagacagcaatttctgaaggagtgaagcctgcacagtcgtacagaggtgcaggtgtagcgaaactcaagcttggaaactatgaagaagccataacatatttcgatgatgcgcttaaatgtgacaaagttggcaaagcattaaaaaaagatattctgtcgtatagagctgtggcttatctcaaagtaaaggattatgaggcagcgctggaagactgccagactctggcagaaaactataaaatggatgcggatctgtacttccttacgggagaaacagcattggccatggattcctatgaggaagcttctgctaattttgaacaggcctacggcgaagatgcaacttatgacagagctatccagatctacggggcatatctgaacagggatatggaagcagacggaacccgttatctggaagctgctttgtcaggaactgcaaaaaatgcagaggatcattgtgaccgcggcagagtttattattatatggatgattatgaaaatgctgaaagtgaactgaaacaggccatagacggcgataatacggaggcactggttctgcttggtatggtatatatggataaaggagacagcgcaaatgcaaaagcaatgtttcagcagtatgtatcacaggcagaaaacggagccaaaggatttaacggacttgcactgtgtgatatagaggatggggattatgacagtgccctttctgatatagaaagcggaatccatgtggcaggagcggaggatatgcagagtctgctgtttaatgagatcgtagtctatgagaagaaactggattttcagactgctttgcagaaagcacaggaatatctggaattatacccggaagataaaactgttaagaaggaacttgcatttcttaaaacgcgtgtgtaatatctatctgactgaggagaatttatggaagaatttggaaagcttgaagaacgggtggttcttgtgggagtgcagacggatgatcatgataatgtggaagaatccctggatgaactgaaggagcttgcatcaactgcgggagctgttacagtgggaagaatcattcagaatcgtgagtctgtgcatcccggaacttatattggaaaaggaaagatagaggaagtacgtgcactggtatatgctatggatgcaaccggaattatctgtgatgacgaactttctcctgcacagctgaataatctggagcgggaactggactgtaaggtgatggacaggacattattgattctggacatttttgcagcgagagctataaccagtgagggtaaaatacaggtagagcttgcacagcttcgctacagatctgcccgtctggtcggtctcagggaatctctttcccgtctgggaggtggaatcggaaccagaggtccgggagagaaaaagctggagacagaccgtcgtcttatccgtacaaggatctctgctttgaagcaggaattatcccaggtggagaaacacagggaactgatccgttccagccgggccagaggcaatatgaagactgctgcgatcgtaggatatacaaatgcgggaaaatctacgctgctgaacacactgacaggctcagaggttttatcagaggataaactgtttgctacactggatccaactaccagacttttaaatttgaaggacggacagcagattcttctcacagatacggttggatttatccataagcttccgcatcatctggtcgaagcattcaagagcacattggaagaggccaaatatgcagattatattatccatgtggtagattcttccaatccgcaggcagagatgcagatgcatgtggtatatgagacattaaaagaactgggagtgatgggaaagaagatcatcacactctttaataagcaggatgcgccgggggcatgcgtactgcgagattttaaatcggactatacgctgaaggtctctgcaaagacaggcgagggtcttgcagatctgaatgatcttctggagaagcttcttgctgaagaacagatttatgtggagcgccttttcccttatcaggaagcaggaaaaatccagctgatccgcgaatatgggcagcttatctcagaggaatacacagaggaagggattgttgtgaaggcaagggtgccgaaagaaatctacgccagagttgtataaaaaatattttgaaaaataagaaaataccatatattgtgccttttgcgaaaatgaggaacattatgtggtattttgcgtgttgacgaaccggtgatactctgatacaatgaacctacagtgttactcagagcaaagtggacagtaacgacagaaatatctccggtaagaatatgcaggagaaacagattaacaagagaaaatgggggcattagatatgtttcaggtagtaaaacgtgatggcgaagtggatgagtttaaaataggcaagatcacagcggctatccataaagcctttgatgcaaaagagaaaaattatagcgaagagatgattgatctcttagggctgcgtgttacttctgattttcagaaaaagattacagataataagattacagtagaagaaattcaggacagtgtggagaatgtgctgatccaggccggatatgcagatgtggcaaaagcctacattctttaccgcaagcagagggaaaaggttcgcaacatgaagtcaacgatcctggattacaaagaaatcgtaaacagttatgtgaaggttgaggactggcgtgtaaaggagaactccacagttacttattcagttggaggtctgatcttaagcaactccggtgcagttactgcaaattactggctgtctgagatttatgacaatgaaatcgcagatgcacacagaaatgcagatattcatattcatgacttgtccatgctgaccggatattgtgcaggatggtcactgaaacagctgatccaggagggacttggcggtattgaaggcaagatcacatcttcacctgcaaagcatctgagtgttctctgcaatcagatggtaaactttcttgggattatgcagaatgaatgggccggagcgcaggctttctcatcctttgatacttatctggcaccttttgtcaaggcagataacttaagctatccggaagtgaagaaatgtattgagtcttttatttatggagtcaataccccaagcagatggggaacacaggcacctttctccaacattacgctggactggacagtaccggatgatcttgcagagcttccggctatcgtaggcggaaagaatatggatttcaagtacaaagactgcaaaaaagagatggatatgatcaataaggcatttattgagaccatgatcgagggggatgccaacggacgcgggttccagtatcctattccgacctattccataacaaatgagtttgactggtctgatacagagaataaccgccttctttttgagatgacatccaaatatggaacaccgtatttctcaaactatattaacagtgatatgaaaccaagtgatatccgcagtatgtgctgccgtctgcgtctggatctgagagaactccgcaagaagagcggtggtttcttcggatcaggagagagtaccggttctgtgggggtagtaactataaatatgccacgtatcgcatatctttccaagacaccggaagagttttacaatcgtctggatcgcttaatggatatttccgcacgttctctgcatattaaacgtgaagtaattggtaagctgctggatgagggattatatccttatacaaagagatatcttggaagcttttccaatcatttctctaccattggactggtgggaatgaacgaggttggtctgaatgcccgctggctgggaaaagatatgtctgatgagcgtacacagaggtttacaaaagaggttcttcttcatatgcgggaacgtctgtccgattatcaggagaagtacgaaggagaactgtttaatcttgaggcaactcctgctgaatctactgcctatcgtctggccaaacatgacagaaaacgctggccggatattaagactgcaggcaaggaaggggatactccttattatacaaacagttctcatcttccggttgaatataccacagatatttttgatgcactggatattcaggatgatctgcagacgctttatacatcaggtactgtattccatgcatttatcggtgagaagcttcctgactggaaagcagcagcagcactggtacgtaagattgcagagaattataaactgccgtattatacgatttcgccgacctattctgtatgtaaggaacatggctacatcagcggagagcatttcacttgtccgaaatgtggtaagaaggcggaggtttacagtcgtatcacaggatattacagacctgtacagaactggaatgacggtaaagcacaggagtataagaaccgtacgctttatgatgtgatgcattcagatatcagaaaaatacagccggttcatgccagtgtagttactgtgactaaggatgatgtgaagatagaacctgtggcatcacataaatacctgtttacaaccagtacttgtccgaactgcagagtggcgaagaagatactggaaggcagggagttcgagattattgatgcggagaagaatccggagatggtgaaggagtttggaattatgcaggctccgactctggtgatcacagacggtgagcatatgacgaaatatgtaaatacatccaatattaagaaatatgtggatgagggattataaagatactgagagagttgaccggaggataaaagagatgatcaaacagaatgttgtatttgtggaaaataaagcaggaagtctgaaaagagtgacagggatacttgcagataacgggattaatatttatggatttgcatgcttcgatgcaccggagtttacaatcttccgtatgatctgcaacgatccggataaagcggaaattgttttaaacaggagtggatatatgaatcgtattacacaggcgatcgtaattgatatgaaagatcaggtaggcggtctggatgaactcctgaaagtagcatcagacagtaatgtaagtcttgactatatttatacttctttccacagaaaagatctcagacctgtagtaattcttcagacggaggatggtgcagtgacagaatgcattcttaagaataatggatttaatgtatttacttcagcagaagaactggagaaataatactgtataagacagtgagagaatcacaggactggggatggttctgtgattttttgtatattcatataggaaagttgaatatatcttgactatatgactaggaatactatataataaaagaaaacaatgataatccgacgaaatttaatcaggaggttttgaaaaatgcagatttctacaaaaggaagatatgctctgagacttatgcttgatcttgcagttcataatacaggagaactggtcaagatcaaagatatttctgcaagggaaaatatttcagaaaaatatctggaacagattatttcatcattaaagaaggcaggatatgtaaagagcctgagaggggcacagggcggttatatgcttgccagagagccggaaacatatacggtgggaactattctgagactgacagaaggcagcatgaagccggtagcctgtctggaggacgaaccgaatcagtgcagcagagccggggaatgcgtcacactccgtctctggaagatgcttgatgaagctattgagggagtactggataaggttacattgcaggatcttaaagactggtatgaagagatgggaaatgattatgtaatttgattttccctcttgacaacagtggatttatagaatatcatgtatataacatataattcatatatacttagtatgaaataaggaggacgaactcatggcaaaaatctataaaaatgcagcggaactggttggaaatactcctctccttgaggttggaaatcttgaaaaagagcttgggctggaagcgagaatacttgtgaagcttgagtattttaacccggcaggaagtgccaaagaccgtatcgccctgagtatgatcgaagacgctgaagagagaggcgttctgaagcctggcgcagtgatcatcgagcctacatcaggtaacaccggaatcggtcttgcttctcttgctgcaatcaaaggatacagagtgatacttacgatgcctgagacaatgagtgttgagagaaggaatattctgaaagcatacggtgcagaaatcgtattgacagatggaacaaaaggtatgaatggcgcaatcgccaaagcaaacgaacttgcgaaggaatatgagaacagttttatcccgggacagtttgataaccctgcaaatcctgcaatccacaaaaagaccacaggtccggaaatctggagagacacagacggacaggtagatgtttttgtggcaggtgttggtacaggcggaacgatcaccggtgttggtgaatatctgaaatcccagaattctgacgtgaaagtagtggcagtagagcctgcaacttcccctgtactttctcagggaaagagcggtccgcataagattcagggaatcggtgcgggatttgttccgaaggcattaaatacagaggtttatgatgaggtttttccggttgagaatgaggatgcttttacagttggcaagttgatcgccaaacatgagggaattcttgttggtatttcttccggtgcggctctctatgcggcaatccagctggctaagagaccggagaataaaggaaaaacaatcgtagctcttcttccggattccggtgaccgttactattctactccattatttgtgtaaaataaaaaagccctttttagggctttttttattttacataaatgtgttagaatagatatgctgtacaaatgatttttatgtaactgttcagtattttgcagaacagctaacataatataaataaaattatcataaacaataatattccgtgtaatcggatcacagaacaggatggaataaaaatgagaaaagcaattatcgcaatgagcggcggagtggacagctctgtggcagctctgcttacaaaggaaaccggtgatgaatgtatcggtgctaccatgaaattatttcacaatgaggacataggagtaaagagagagaaaacctgttgttctctggatgatgtggaggatgccagaaatgtctgctacagaatgggaatcaggtactatgtttttaacttttccgagaggtttaaagaggatgttatggaccgctttgtggatgcctatgagcatggagctacgccaaatccctgcattgactgcaatcgttatctgaaatttgacaagatgtttcagagaatgcgtgaactggagtatgattatattgtaaccggacattatgcacgtgtggaatatgatgaggagaagaaccgttacttattaaagaaagctgtggatgatacgaaggatcagagttacgtgctttatatgctgacacaggagcagcttgcgcatatttccctgccccttggcgggcttcgcaaaacggaagtgcgtgagatcgcagagaagcatggatttgttaatgccagaaagcatgacagccaggatatctgtttcgtaccggacggtgattatgcaaagtttattgaacagtacacaggacgtaaatcaatcccgggcgattttgtagatacagaaggaaacattcttggtaaacataaaggaatcatccactatacacttggccagagaagaggacttggtattccggcagcatccagactgtatgtgtgtgatatttctccaaagaccaatcaggtggttctgggaaataatgaggatcttttccattcggaactgactgcaacaaaggtcaatctgatttcctgtgaatctctgaaggagccaatgagactgaaagcaaagatccgttaccgtcatccggagcaggaggccgtagcatggcagacggaagatggagtgctgcacgtgcgttttgataaaccacagagagctatcaccagagggcaggcagttgtgttatatgatggtgatatcgttgtaggcggcggcgtgattgaaaattgtattaaatgacagattttccctgtctttcgcattttgtcggactgtcttatctgcactgtttttttggaaacgttatagttattagctattaaacgctatagaaaatttcctattgacgtactaggaattaaatggtaatatacaactatgctaaatcatatcaaacagatatgaaaagcgtagaaacaaaaatgacttgcagataaggggcttaagagccggaatcagttttgcagagaaaaagattattataaatcagagaaagatgaggatatacacatgagcaaaaaaatcgaaagaaaagacagacatttcaaatttgaaacattacagcttcacgtaggacaggagagtccggatccggttacagatgcaagagcagtaccaatctatcagacatcttcttatgtattcagaaactgcgatcatgcagctgcacgtttcggacttgcagatgcaggtaacatttacggacgtcttacaaacccgactgaagatgtattcgagaaaagaatcgcagcgcttgaaggcggttctgcggcacttgcagtagcatccggtgcagcagcaatcacatatacaattgagaatcttgcacagcagggtgaccacattgtagcagccaagaatatttacggtggaacaacaaaccttttggagcatacacttccagcttatggaatcacaacaacattcgttgatgtatttgatcttgaagaagtagagaacgcaattcaggataacacaaaagctgtttacatcgagactcttggaaacccgaactctgatgtagttgatattgaagctatcgcaaagattgctcatgcacataagattccgcttgtagtggataacacatttgcaacaccttaccttgtaagaccaatcgaatatggtgcagatatcgttgttcattctgcaactaaattcatcggtggacatggtacaacaatcggaggtgtgatcgttgagagtggtaaatttgactgggaagcatcaggtaaattcgcatctctgacagagccgaatccaagctatcatggcgtaagctttacaaaggcatgcggaccggcagcatttgttacaaagattcgtgcaattcttcttcgtgatacaggtgcaaccatctctccggtaagctcattcattttccttcagggacttgaaacactgtcacttcgtgttgaacgccatgtagagaatgcactgaaagttgttcagtacttaaataaccatccgcaggtagagaaagttcatcatccgtctgtatccacagatccggttcagcaggagctttataagaaatacttcccgaatggcggcggttccatctttacatttgagattaaaggtgatgcgcagaaggcaaaggacttcattgataatctggaactgttctcattgcttgccaatgtagctgatgttaaatctcttgttatccatccggctacaacaacacacagccagtgcacagaagaagaacttctcgatcagggtatcaaaccaaatacaattcgtctttccattggtacagagaatattgacgatatcattcaggatcttgatgaagcatttaaggcagttgctgaataatacagatataacatccttatatattgtataaataaaacatgaataaaaagaccatcttccggattttcccccatatctgcaagatggtctttttgttattgtttacacaccgctatcccgcgaggtgttttggcatgaatatgccaaaatcccgagacatacaagccaaaattccattgccgcaggcaatctggaatgaattttggctacgttactgtgaacggagtgaaccaatgtcattaacttaagcaatttgctaatactgcattgatgaaaatatcagcagaaggatttgattatgataaaaaaggggatattgagggattaagatacaatgttttactgaaatttgggtataacaaaaagacaaaatcaatatttaacattgaaatttgtctaaagatgaaatatagtaatatatgagttaatgctaatgtctataacaaaaactcatcgggagtttaaacctatgctggcgggcaaaggttcttccaggtctgatcggctcaatattttgagcgatcagaccttctacatttatctttgttatcccatcgtgaatccttaaaaaatccctgcatgttttaagcgcggatgaataattcgcctgatattcataagcacgatcttcccgatcaatagttacatttatgattatgctggaactgaaattatatagaataactcttgcccatacttcctgcacaatataatcatatttttttgagtgaaacgctttcagacacagggaatattttaaatctcggaaagagttttcctcctgccatctcagatgataaagagctttgaaatcttcagctttaaactcttcttctggaagattcgtagcaatgttttcataagagccatcatcaagctgtacgcgtaacaaacgtaaagcaaggtcatattccgttctttgatcattgagataatccatcggagcattctgataaatgtatcggtatgaagagaatagttcaggtctggaatatttgcttacagctttagacctcgtcagtataagagagatatcttcatcaaaagctggcagggtatcaaccggatatcccatcattccggaagctcttttatcgttacatcggataaggaagtactgccccttttcaatcacatgggcaaagttgttgtaagaagtataacctctgtccccaaagaaaatgactttggagtgttcatggatatctgcagaatcaaccatggaacaaaaagcagaatactcatttcgctttcgggcaggctggactaaaatatcagtaaaacgcttatcaagtaaagaaaacatagcattgatatggatctggttaaatcctctggtagatttaccatttggttcaaaataggtatccttatcttcagggttaaggaaaatatcacaggaagaaccatcgcaggcccagaattcatatttaccgttatatagttttttaggaagtttcctgttaaaagcaagaagaagattccgaaaagcatcttccctgatctttttacgctgtctgtaaaaagccgctttggaaggtgcatcgatagtacgtccgaaaaaacggtacagttcttccctgatacagtcagcttccatagtcagaaacatcagcatataatctttaaaaccaagttttctgtttctgataaaatcaactccgggtttgacagcatatttttccggtgttttggaaagatcattgatagcagcaagtaaaatagctttgatagaatctgaatagttcataaataaatactcctttgattaagtaattaaaaataacagtgcctaatcaaagggcgttattactgattgatcagtaataacgccgcatattgaggagtatttgtcaagtaatattttaggaaatatcaagcaggtatcagagagagcattgcccgtttaacaagcaacaatctcttaagttaatgacattgggagtgaacagtaacgtcttttttcggaatgtttcaattgtatggtttacagacttgacaaattataaaaatactatataatacagaaatgcaaataagttgcaaatgtaaataagttgcaaatacaaataaagtgcaaatataaggagaactatatgtcagagattatattagattcagtaatagacagcatcaagctgctaccctttctttttcttacttatctgtttatggaatggctggagcataagacaggtgcggcagcacgaaagagaatccgtacagccggaaaattcggaccggtatggggtggacttctgggagtgatcccacagtgtggattttcggcagcggcatccagcctttttgccggacgtgtgatcacagtgggaactttgatcgcggtgtatctgtctacttcagatgaaatgtttccgatcatgatctccaatgcagttcctgtagttacaattgtgaaaatcctgacctgcaaagcggtgatcggaatactttccggcctggtgctggagtatgtttacacacatattctgaagaaacaggaacctgatgtggatattcatgaaatctgtgaagaagaacgctgccattgtgaacatggagttatttcttcagcagcatttcatacattaaaagtttttgtgtacattttcttgatttctcttgttttaaatattatcattggattagtcggagaagagacactggcaggactttttacaggaacaccgattgcaggtgaactgatcgcagctttagtgggactgattcccaactgcgcttcttctgtagtgatcacccagttatatctggatcatattatcggagccggggcgatgatggcgggacttcttgtaaatgcaggagttgggcttctgattctgtttcgtttgaacagagacagggttcagaatctgaaaattgtgggagtactttatggacttggtgtattctggggaattattattgaatttgcaggaattgttttctgatcaaccgagtctgctctgtcagaagaagctgattttaggaggaatgataaaattatggcaggaagcagttatgcgacagcaagccgcagaaaaatacttgaatatttgaaaaacagtaatgaccatacggttacagctgctgatgtggatgagtatctgaagaaacatgacagtgaggtaaatatcacaaccatttaccgctatctggacaagcttgcaaaggatggaactgtgatcaaatatgttgcagagaaaggttgccaggctgcttatcagtatgtagaaccgggacggggatgtgaacagcatctgcacctgaagtgtgtaaaatgtggaaagatcattcatctggaatgtcattttatggaagaaatttctcatcatattgaagaaagtcatggatttaccctgcagtgtaagaattctattttgtatggagtctgtaaagaatgtaaaggcagtggcgaagactgttgactgtttctatcagatgatgtaaactgaaatacaactgtttggtcaaattgactgcgaagcagtatggtgaagagaaaagacagcgaaattgctgtaagtaccggtaaaaataacagataatatatgaaatcataaaagaaggcaataatgagaaaacagaagagacagatgtgtgtaagaagaatgttattattttttctggcgtgtgtattaatatgtgcagcacccccgtctgcagcacaggcggcaataatgcagactgctaagaattcaacagtgcaaaagaaaaaaacatccacgaaaacagttacaatagagacttcaggagaaatcacaaaaaagaaagtgaaaagcggtggttctgtgattcttcctgtggaagtgaataagaggggatatacatttctgggatggtcaacagttcccggacagacctgtaatccaatgtatcaggcatatcagaaaattcaggttacgaaaaatattcatctttatccggtgaagtataaatggaatcaggaaccggatatttatgcaggcggtcttgcggacagtgtggagaaatatgataagattatttttgtgggagattcccgcacagcaatgcttcgcagtactctgaagcagcaatgcagttctgacagtttaaagaaagttggatttgtatgcaagacaggagaagggcttgactggatgaaaaaatacggagaaaaggaactgctgaatgaaataagcgggatggatgacaatgcgaagccggtggcagttattttcaatctgggagtaaatgacctgatccacaaaaacaggaagtccatcagttatgattctgttgcgtcagactatgcttcttatatgaatggattatccagaaagctgactgccaggaactgtgaattattttatatgtctgtgaatccatgtaatacggcaatgaaatccacgcggaaggagtctgagatccgcggatttaataacagactcagacagagactgaacgggaattttacatggatcaacagttattcttatctgatgagatgtggttatacgactcgctgtgaatttcgcggttatacagatgatggtgttcattattctatgaggacttataagagaatttatgcatatgcaataaaacagatcagataatcctgactgaaacccggagacagaatactgttctccgggttatctgtgtgtatcagtaaatacgaaagttgtagctgtgaaagagttaaacagttatcaaaggctcacaaaaggtgacaggaggggagaaacatgagaagtgaaagcttcagaaaaggagttaaggatggtattcccataggactgggatattttgctgtatcgtttacatttggcatgatggcagttgctgatggactgagtatctggcaggctgtgctgatctcattgacaaacgtgacttcagcagggcagtttgcaggacttgagatcatggtaatgagcggatcttactgggagatggcactgacacagctgatcattaatctgagatattgtctgatgtcattttcccttgctcagaaattcagaagagatgaatctttggttcaccgctatattgcagcatttggtgtgacggatgagattttcgggatcagtgccagtcagcccggaaaggtaagcgcattttataattatggtgccatgtgtgtggcaatcccgggatgggtacttggaaccctggcaggagcaatttccggaaatcttcttccggattttatgatgagtgcactcagcgtggctatttacggtatgttccttgcaattattattcctccggcaaagcagaataaggcagtactggcagttgtcgtggcagcaatgctgatcagcactttgtttaaagtgattccgtttctgtcggaggtttcgtcaggttttgtgatcattattactacactgatcgtggcaggggctgccgcatacttctgtccgatagaggatgagaaagaggaggagggtgttcatgagtcataatatttatatttacattctggtaatggcagcagttacatatctgatccgtatgctcccgcttgctctttccagaaaagagatcacaagtccgtttatcagatcatttctgtactatgttccctacgcatgtctggcagccatgacatttccggcgatcctttttgccacagacagtgtgatctcggctgctgtgggatttattgtggcactgatcgcggcatataaggagaaaagtcttcttacagttgcgttattcgcatgtgctgcggtatttattgtggaaagaatactggaatttgcagtgtaaaagttgataaaaaacggatacataaccacagctgaatggtgtgtatccgttttttgttgcgtaatattgtgaccggcagctgaagcagataagctgtctgttatttgctgcagtttcagacagttttttatttcagaaagcttacatcaatttcaccgtcaaatactgtggcagccgggcctgtcatgtaaacaagattctcctgtctgttccagaaaatctgcaggtcaccgccgagaagttttacagtgacaggactgtcaccgtctacatgtccgttcagaacagaagcgactgctaccgcacatgcacctgtgccgcaggcaagagtttcgcctgaaccgcgttcccatacacgcatttttacagtatgttcatcgatcacttctacaaattcagtgtttacacgatccggaaatgcaacatgattttcgaaagcagggccgatcttttcaatatccagatggtcaatatcatccatataaacaatagcgtggggatttcccatggaaacagcggttatgtaatagatttttccgtttacatccagaggttcattgataacttcctccttctctgacactaccggaatctgtctggcggtcaggatcggagaacccatatttaccttaaccttggatacctttccgttttctacagtaagatccagatatttgatgccgctttttgtagcaacagaaatatgttctttgtctacgatgccgtagtcataggcatatttggcaacacagcggataccgtttccgcacatggcaccctgggaaccgtcaagattatacatatccatctcgcagtctgcgattttggatggcttgatcaggatcagtccgtcggaaccgataccaaagtgacggtcactgacatatctggctactgcggaaggattttccacagtttcctcaaaacagtttacatatacgtaatcatttccaataccatgcatttttgtaaatttcatcagaaaagcctccttatttggttaaatatttatacacctcttgtatcatatagaaaaaatgttatgaaaaagtgaaaattacgaatcttttaccgggaaagtttttctgtgatcttcatgtaaaaaaacattttgcccttcccggaacagttatgtattatacattatatggaaaatatatctgttattcaagttttaccttgcattttatagaaagtatgttaaaattaaaaacaaaaatatacaaccgaaacgcataattatacgctgttgtctgaagaaggtaaaaagatggcagccgtagatatactttcggatgcgaggaggaaaaaagatgaaagatcaaaagagatttgcagctcttgcactcagtgcagtaatggtattttccatggcaggaagcgtatccgcagctcagaaagttgaatccaaagatgatcttgcaggagcaacaatcggtgttcagcttggtacaacaggtgaccttgatgcatctgattatgagaaagatggttctacagtagaacgttacagcaagggaagtgaagctgttcaggcattaaaggcaggacagatcgactgtgtgatcatcgattcacagccggctcagaaatttgttgagaataatgatgatctcaagattctggatgagccattcgaggaagaagaatatgcaatctgcttaaagaaaggcaatgatgaatttcttgacaagattaacggagctctcaaggaactgaaagaggatggaactatcgacagcatcatggacaattacattggtgaggatgccggtaagactccatatgaatcaccggaagatgttgaccgttccaatggaactctggtaatggctactaacgctgagttcgaaccatatgaatatcatgaaggtgatgatatcgttggcatcgatgctgatatcgctcaggcaatctgtgataagcttggatatgaactgaaaattgaagatatggaattcgattccatccttccggcagtacagtccggcaaggcagacttcggtgcagctggtatgactgtaacagaagaccgtaaatcaagcgttgactttacagatacctatgcagatgcaagccaggtaattattgtaaagaaataagtattaaaataacaaataacagagctgttgacgatttgccaacagctctcttttcggaacagaggtttttatgaataatcctatgatattagcgaatgtaaaagaagatttttatctgaactttattaaagatgaccgctatctctggcttctggatggtctgaaaacaactcttattatcacagtatttgcggtaattgtaggtctgatcatcggtttccttgtagcaatcatccgttctgcgcacgataagtcaggctcctttaagatcctcaatgcgatctgcagagtttatctgactgtaattcgtggaacaccaaccatgatccagctgttgatcatgaattttgtaatttttggtgctgtaagcattaacaagatcattgtaggtggacttgcctttggtatcaactcaggtgcctatgtagctgagattgtccgttccggtatcatgtccattgaccagggacagacagaggcaggacgaagccttggtctgaatttcagccagaccatgcgactgatcattatcccgcaggcatttaagaatgtacttcctgcgctggtaaatgaatttatcgtgctgatcaaagagacatccatcatcggttatatcggtatgatggacctgacaaaaggagctatgctgatccagagccgtacatacaatgcgttctggcctctgatggcagcagcagcgatttaccttgtgatcgttggaatccttacatgggggatgaataaactggaaaggagattaagaaccagtgagcgataagaatgtactgatccaggtaaaggatctgaagaaagcttttggtacaaatcaggttctcgatggaataacaacagatatctgtcagggagaagtagtagccgtcattggtccttccggttccggtaaatctactttcctgagatcactgaatcttctggaggttccgacaggcggacagatcctctttgaaggaactgatattacagatccgaaggttgacattaacagacaccgtcagaagattggaatggtattccagcagtttaatctttttccgcataaaacggtaaaacagaatattatgctggcacctgtagaactgaagctgatgacaaaggatgaagcttcaaagaaagcggatgagcttctggcacgtgtaggtcttccggacaaagccaatgcatatccggatatgctttcgggcgggcagaaacagcgtattgccattgcacgttctcttgccatgaatccggatgtgatgctttttgatgagccaacttccgcacttgaccctgagatggtaggtgaggttctggaattgatgaaagaacttgcgcagtcaggtatgaccatggttgtagttactcatgagatgggatttgcaagagaagtggcaacaagagttctttttattgatgacggtaagatacaggaagagaatactccgaaagaatttttcgcgaatccgaagaatcctagactgaaagacttcctttcaaaggttttataagatgctgagaaaatttaacagtttcatagaaaaatggatggccctggtgacaccgacctgtctgttactgggggtgtgctttcctgatattgccaaatgcggtctgccttatgtgccggccgtatttgcatttatgacatttgccggggcgttgaagtcaagatttaaagatgtggcaaatgtattccgacatccgggctcactgcttattatcatgcttctggtccatgtggtaatcccgacagcagcctgcggggcaggtcatcttttctttggaaataacatggaactgatcaccggaatggtactggagtttgcagttcccactgcagtggtaagtctgatgtgggtgacgatttatgatggaaacagtcctctgtcgttgtctctggtagtgctggatacggtactggcaccttttctgatcccggctacgctgaagatcctgctgggctctgcggtgaccatagatcctgccaggatgatgcgggaactgatatttatggttgcgcttcctgctgttgttgcgatggtattaaatcagatcacagatggaaaagtaatggaaacatggccgggaaagctggcgcctttttcaaagctggcactgatatttgtggtaacgtccaattcttccaaagtagcaccatatatccgggatatgaatatgcagagggtgaaggttgcactggcaatccttgtcctggctgcttccggatatgcactcggctggtttgtggcgtatatcttccgaaaggatcgcagtacggcggtttccatgatgtatggaaccgggatgcgcaatatcagcgcaggagcggtgatcgcagctgcatattttccgggtgaagttatgtttccggtaatgatcggaactctgtttcagcaggtgttggcagcattgttcggaaagcttctggcacagaaaaaggaaaaacaggaattttgttgaggtctgctgaggcgttataaagaatataaaaagaactgccgcattagcaattgaaaaattgcaatgcggcagctctttttatgaatctgaagcttttatatatttcttcagttctttgtagcagtatttgatgatctctttacgggtgatgatgccgataaagtatccctgatcatctacaaccgggacataattctggttaattgccttgtccagcagatcttccatgtcagaatctgcgtgaactgccttataggttgctcttcgcgggattgccataatggaaatgctctctgcttctttcagtccgggaacatttaaggttttcattccccagagaagatcaccctcggaaatacttcctttatatttcccgtccagactcagaagcggaatgcaggaaaattttctgtgttccattttctcaagagtctgacgaagagtctcattttcaaatatatatgctacatcacttttaggtgttaaaaaaaataaaatattcacttttgtattcgccccgttacatttgtctgataaggcactcagatatacattgtgtatttacacatctgtgtgtctgtgatctctgagtattccaggtttacggcttttttacagaagctgtactccttttgctgctgcttctttcattacttcttccggccacagggaagcatgtacttcaccgatgtgtgcttttctgaggaagaacatacagatacgggactggccgatgccgccgccgatagtatatggaagttctttgttaaagattgctttctggaaaggaagttcgcgtctgtcatcacatcctgcgatggtaagctgtctgtcaagcgcatcctcgtcaacgcggatacccatggaagaaagctccagagcaatgtcgagaacaggataataaacaaggatatcgccgtttaattcccagtcatcgtagtccggtgcacgtccgtcatgacgttctccgttggttaaggttttgccgacctgcataaggaatacggcacctttttccttgacaatcttgtattcacgttcctttggagtgagatcaggatacatgtcgaccagttcctgggtgctgacaaatgcaatctctctcggaaggatttcttcgatgtaatcgtactgaacagccatgtatttttcggttttgcggagaacgctgtagatagcacgtactgtggaaacaagtgtgtccatgttgcgttcttccttgctgatgatcttttcccagtcccactgatctacgtatacggaatggatattgtccagatcctcgtctcttctgatcgcgatcatgtctgtgtaaagtccttcaccatgagcaaagccatatttctgtaatgcatatctcttccatttggcgagagagtgtacgatctcagcattctccggctggcctttgatatcaaagcttaccggacgttccacgccgtttaagttatcgttcagaccggatgacggattaacgaataccggagcggaaacacgcagcagattcagtttttgagccagtgtctgctgaaagaaatctttcacagtcttaatggcaatctgggtatcgtgaagatttaaagatgactgatacccgtcaggaattttaatctgttccatgagtggattcctcctgtaatttctgtatttgcatattttatggcaaactgataaaaaatattgttgtttactgaatatccattatcttttcccacgctattataacaggaaaatggtagtttgacaattattactgttcatttggaagtatctcgcgggatattatggttacggagaacagaacgaacagtaacacaatttcagctttgcaagattggggcgaaatgttaaaataaatgtgtaaatgaatgaagcgttaaatttatataaaacttagggggaagatatatgggaaaaaggtgtcaggtctgtgatggaccaattgtaaacggcaggtgtaaatattgtggaatgccatatagaaatgatatggaactgtatcatctgaacgaagaccgttcagagcactatcgtcatgcttcggcaaaggtgaaaaaagcaatggcagagaacgagatccctttgtctgacagaaataaaacagttcccaaagctgcaaaaacttcgtctgccagaacacagactattagaacgcaaaatacaaaagtacaaacttcaagaatacaaacatcagggacaaagaaaacatcaggtcagtcgtacagcgcacagactgcccgtacatacagcaccggaaaaaagacagcaaaaagtgagaagaaaaagagcggcaaggcaggcaaaattttctggatcattgtgctgattctgatggtaataataggtcagatggcagagaattgggatacgattggatacaggatagaagaatttatctatgatgagtttgacatagatctcaacagtatttttgatgacagcagttctgatgaagtaaatgagagtaataagaataatgaaagtaatgaaaataatgaaagtaatgagaataactggacagatgactggtctgagactatcagtgcagtaaagaacggacaggatgaacagaggggtaatccggactggtatatgttcaccggagagaattatattgtcagaacggatgatactgcatcagagattggcgatacagatgccagtgaccaggggtatgattttacaatagatccgggagaatacaggatagtgtccggctgggagaaggttgctctggaaatcagaagttcttcaggaaaagatgaaactgtaaaatttgacgaagcagaccacgaggagaaaatagaattacatgccggggatgaggtatctgtggtatctctggatggtcaagataattatcttgccatgtatcaaattcagcaatatgacgaataattttttgcccctttctttttgccagagactgtgctatacttgttaaacgtaccacatatagagagaattgtggtgaatgaaagaaaaaaatactatatattgtatatgggagcaaaaggtatgatatatgttataaagaaagatggtacgagagaagagtttaattcacagaagatcgtagcagcagtaaataagtcggcagccagaattttatatacattttcggataaagagaaggaatttatctgccagtttgcggaagaacatgcggaggcactgggaaagaatgagatagagatccaggagatgcacaacatcgtagagggagcacttgagagagtgaacccggcagtggctaagagctaccgcgattacagaaattacaaacttgactttatccatatgatggatgatgtatataccaagagtcaggcaatccgttatattggtgataagagtaatgccaatacagacagtgcgcttgtagctacaaagcgaagcctgatctttaatgaactgaacaaagagctttatcgtaaattttttatgaatcgtaatgaacttcaggcatgtaaagatggttatatttatattcatgaccagtctgcacgtctggataccatgaactgctgtctctttgatgtggcatctgtactcagcggcggatttgagatgggaaatgtatggtacaatgagcctaagacactggatactgcgtttgatgttatgggtgatattatcctgagcactgctgcacagcagtatggcggattcacagtaccggaagtagacaagatccttgcaccttatgcacagaagagttacgataaatatatccaggaatttatgaaatactctgacgagagctggacaggacgtgaagaacgtgcgatcgagtatgcgcttgacaaagtccgcagagattttgaccagggatggcaggggattgagtataagctgaatacagtcggatcttccagaggggattatccatttgtaactgtaactcttggacttggaataaagcagttcgagaagatggcaagtatttctcttcttgaagtgcataaaggcggacagggtaaggcaggacgcaagaaaccggtactcttcccgaaaatcgtattcctttatgatgaaaatatccatggaaaaggcaagatcagtgaggatgtatttgaggcaggggttgactgttctgccaagactatgtatccggactggctgtccatgtcaggaaaaggatatatttccagtatgtacaagcagtatggaaaggttataagtcctatgggatgtcgtgcgttcttaagcccctggtacgagagaggcggtatgtatccggcagatgataaggatgttcctgtgtttgtgggaagatttaacatcggtgcggtaagccttcatcttccaatgatccttgccaaagccagagcagagagcagggatttctacgaagtgctggatttctatcttgagatgatccgtaatctgcatatccgtacctatgattatctgggacagatgcgtgcgtcaaccaacccgctggcatattgtgagggaggattttacggtggacatctgaaaccgaatgaaaagattggcaagattctgaaaccaatgacagcatccttcggaatcactgcattaaatgaactccaggaactttacaatggcaaatccattgctgaagacgggcagtttgcactggatgtgctgaaatatatcaacaggaaagtaaatgaatttaaagagaaagatggttatctttatgcaatttatggaacaccggcagagagtttatgcggactgcaggtggaacagttccgtaagatgtatggcattgtgaaaggggtttctgatcgtccttatgtaagcaacagtttccactgtcatgtgactgaagatgtaactccgattgaaaaacaggatctggagggacgtttctgggagttgtgcaacggcggtaagattcagtatgtacgttatccgatcgattataatcgtgaagcaatacgcactctgattcgcagagccatgtctttgggatattatgagggagtaaatctttcccttgcttactgtgatgactgcggacatgaggaacttgaaatggacgtgtgtccggtctgcggttccaagaatctgacaaagattgaccgtatgaacggatatctttcctacagccgtgtgcatggtgatactcgtctgaacgaagcgaagatggcagagattgcggaacgtaaatctatgtaatatcaggtcaggggtaaacttttgaatctgacatcataatatgataattaaaagacatataccggaaagatgatatgtattgctctggtatatgtctttttgtattatcagataaaatatagcaatccccttaaatgtattatttacgaggattgctatagaatctgaagtttcagatgtttatagtttcaattttgtcaaatgtattatttttaagaggtatactgtagatgaaaccgtcatttatttaatgatagttccggttttttcgaaatatccatcctttgcatgcgcaatatctgtgatgatcgttcttctgttatctcccttttcgataaaagagattccggcttcgaatttaggaagcatggagcctggggcaaactgattgtcagccatatatttcttagcatcatctacagaaattgtattaagatattcttcattgtcctgaccgaggttcagacttactttctcaacactggtaaggatcagaagagtatctgcatttaattcctgtgcaagaagtccgctggaaaggtctttctcaatgatcgcacttgcaccatgaagatcgattccctgttccataaccgggattccgccgccgcctgctgcgattactacctggcccgcatctacaagtgtgcggattgtttcaagctctacaattttctgcggtttcggagctgccaggattcttttgtaagtgccgtcagccagtttagtgacaaagtttcccttgctttcttcagtttcagcctcttcttctgtaaggacacgtccgatgatcttctcaggttcagcgaaagcatcatcatatggatcaatgacaacctgtgtaaggatagtagctaccggtttataaataccgcgggaaataagttctgcgcggatcgcggtctggaggtcatatccgatatagccctgactcattgccgaacatacggacataggtgcaaatgtatagtcaggatgtgttttgccaaattcattcatggctgtgtggatcattccaacctgtggaccgttactgtgggaaatgactacacgatttccggcttctacaagatctgcgacagctttggctgctttttttgtagcgattttctgctccggtaaggtggttcctaatgctctgtggcccagtgcaactactgtaattttttcgctcatgggaattacctcgattctttcatgttctgtaaatatgatatctgcggggtgatcttatatataaagatttttgaaattttttatcactgatatcataaatattcaatcatattgatatcctacattataaaagactgccagtagaattgcaatagaaaataactcaaaaaacacctcgcgggatattatcagtgaacagtaacaaaaaacaaacagctctcacatttctgtgagagctgttttgtttttttgaggggggagatagagagtggtttttcatctatccaagacctattatatgggaaaattatgttcaaagtatgtcgaatttctgaaacaatcggtaaatttataaaagaattataaacaaatacgaaaaataaaaagtggtatcttgtttttatagcatagacatgctaaagtagattcatcggcaacagccgttatcagtattcttattttcacgcaccggtccggtgcaaaaatttccaattatttattgatagtccgggagatggttttgaatcctgagcagaaactctgaaaatcttatttattgtgcaaaacagagaggagagatgcgtatgtctgtggatatgaacttataatctcgaaagatactgtaccgatatcattctgacagtggaagtacctcagatgacatagaataaaaattcaggagaatgagagaatgaaaaaaagaatatggaatcagttaaaaaaagcagtcatgataacggctgctgtcgggattttgggagcaggagcagtatcagcagcagaatttgaagctgcagagttatatgttcctgctgtgggtttaaagcagagtgcacagtggatcgatgaagagaaatttcaggcagaactgacactggaagtgagcggtctgaaagaactgtacaaaagtcaacaggaaaatactgcttcggagaacggacagttgcagatggaaaatagtacatgggatggagaagtgagagaagcagaagcagcagaaaatacgacagatgaagtggattctgaaaatacagagtgtgaattagagagtgcagtaatagatatagaagatatagaaagcgaagaataccggaaggcagaagaaaacgcagaaggatctgacacagaaaccggacagacacaacagagtgagcaggagaaccaaaatgagatcagggaagataaaaccagatattttctgactgtatatatttcagaatattttcaggtaaatgcagaagcgttaaagaatgatctgcaggctgaatccgtacagatacaaaataagaaaggtgagacaacccagattacaaagctgacctgtgagactgcactttcagatgcggaaacagatatctttaccatgaaagtgccggtgtctctgcgtgaagaatatcgtatttcttctgtaaaaacagattatcctctgtgccaggatgcaccgctttgcaaagattgggaggggacaggtgcgtatttctggatgaaatcaggggatgaaacccggactgttgcagaaactccttcagctctgctttccgtacaggaggcaaaaacagggatcacagcccggttacagcaggagacgaaagaggtacgtgcagggcagaaccttacttatatattgtctgtagagaatacaggagaattacctctggaaaatatagagatatccagtgttttttctcaggataatataaaagccgaatggaaacaggaagagggatttactgcaaatggtatgcagggaattatttcaggtcttaaggcaggagaaatcagaaatcttcagatgacagtacagcttacagaagagcaggcaggagagcttattcatacagtaactgtaaaagcgaaatatccgggaaaggaagaaagtattggatgtcagaaatcagtcgaaacagaagtcattgcattaaaggcggcttttgaggtggagaaaactgcggacagaacacaggcatatccgggagatacgatcacatatcagatctgcatcaggaatacgggtgagcggacacttcattcggttctcagtacagaaagattccaaaatgccggtattcaggcaaactttgtcaggaaagagggcgtaacattaaacagcacaggcacacaggctctgattccgcagatcgcaccgggagaggcttttgcactttacgccacagtgactgttccacaatatatggcaagtcaggaattgatcaatgaggtaatcgttacatctgatgagactggtacacaggcaatgacatctaaggcaaacgtagaattaaaggaaactgataatattgttacagttacgccgcaaccggcatctctggcttcccagagttatggatatgactcaaagtccggaagtgcttatactactgcttccaaaccacgtacaggagatgagacagaaacggctttgtatattgtactggggatttttgcaatcatgtccggagtcagtgcattctgttacaggaagacaaaaaaacagcagaagtagagaaacaacgttgaaacgacaggggaggtgtgctattcttatatagaatatacgctttagtaaaacacctctgcctgactttaaagaaattgcgttactgttcacacatcactatcccgcgaggtgttttggcatgaatatgccaaaatcccgagacatacaagccaaaattctattgccgcaggcaatctggaatgaattttggctaagttactgtgaacggagtgaacagtaacgaaatggccgtagaggctgtataaaattcaggcaggcaggaaatgatatggaggattaaaatgaaattaatatccttactggaaaagctggaatatacatgtcttcagggcagtacagaccaggaagtaaaaaatgtgatttatgattcccggaaagtagaagagggctctctttttatctgtatccgcggtgcagtggtggatggccataaatttgtgccggatgtagttgcaaaaggagcaaaggttctgatcgtggaagaagctgtggaagcaccggaagatgtgacagtcattcttgtgaaagatacacgatatgcaatggcgtttatttctgccgcatatttcggatatcccgcagagaaactgaaaacaattggtatcacaggaacaaaaggaaaaacaaccactacgtatatggtaaaatctattctggaaaatgccggatataaagtgggactgatcggaaccattgaagcgatcatcggtgacaaagtgattcctgcaaagaacacaacaccggagtcttatgtgattcaggaatatttccatgagatggcagaagccggctgtgactgtgtggttatggaagtttcctcccagggactgatgcttcacagaactcagggatttgttttcgattttggtatttttacaaatattgagccggatcatatcggaccaaatgaacataaggattttgatgattatctcagatgcaagtccttacttctgaaacagtgcaaggtaggaattgtaaacagagatgatgaacatttcgagaaaattattgaaggtcatacatgcagcctggaaacttatggattttcaccggaagcagaccttcgtgcggaagatgcaaagctggtcggaggtaaaggatatctgggtatttcctaccatctgaaaggacttctggattttcatgtggagatagatattcccggtaaattcagcatctacaattcattgacagcaatcgcgatctgccgtcattttaaggtttcggaagaaaacattctcaaagccttaaaagtagctaaggtaaaaggccgtatcgaaatggtaaaagtatccgatgattttactctgatgatcgattacgcgcataatgccatggctctggagagtcttctgaccactttgaaagaatatcatccccacagactggtatgtctgtttggatgcggaggcaacagatcaaagcttcgccgctatgagatgggagaggtttccggaaagcttgcagaccttaccatcattacctctgataatccacgtgatgaagaaccacaggcgatcatcgatgatatcaagatcggtatggcgaaaaccgatggaaaatatgtagagattccggacagaaaagaagccatcgcctatgcgatccatcatggagagccgggggatattatagttctggcaggtaagggacatgaggattatcaggaaattaaaggaaagaaatatcctatggatgaacgtgtcctgatcgcagatattcttgctggtaaataggtagcgggtcaaacaggaataagttcatgatatatgctgatataataattgatatttccagtgataaactggaccggagttttcaatatcgtgtaccggaaaggctggagaagaaaataaaggcagggatggtggcagccatcccttttggaaatgccggccgggtgcgtaaaggatatgtgatcggattgtcagataaaccgaaaattgctcccgaaaagattaaagaaatcagtgaaatctgcagtggagaagagactacggaatccagactgatcgccctggcagcctggatgagagaaaattatggttccaccatgatccaggctctcaggacagtacttcctatccaggagaaaatcaaggcaaaagagaaaaaatatatatgcctggatatttccgaagaggcgggagcgcagttgctgaaagaacttgaacaaacaaggtttaaagccagaacaagacttctgagggaacttctggagaaaaaaagactggattatacacatgcggcgaaagaactggggacaacttctgctgttgtaaagaaatttcaggagcaggggattatccgcatagaatatgatgagataatgagaacttcactgaatacaggtgatatttccggagaaaggcgaatgccgcttacagatgaacaggaagcggcagtaaagcagatacagagagagtggaaaaaaccatcgccgaagcctgtactgatcgagggagtgacagggagcgggaaaacccaggtgtatataaagctgatcgagcagacgctttctcagggaaaagaagcaatcgtgctgatcccggagattgctctgacatatcagacggtacgcagattttatgccagatttggggataaagtatcagttatcaattccagacagtctcagggagaacgctatgatcagtttaaacgtgcgaaaaagggagaagtccaggtgatgatcggtcccagatctgcgctgtttacgccatttgccagtctgggactgatcattattgatgaagaacatgaatcaagctataaaagtgaaagcacaccccgttatcatgcaagggaaactgcaatcaggagagctgttttagaacatgcaaatgtggtaatgggttcagctactccatcagtggaagcctacagtaaggcaatgaatggggaatatagtctggtcaggctgacaacaagatatggaagcagacctctgccccgggtttctatcgtagacctgcgtgaggaattaaaagcaggaaacaggtctgtactgagcagagaactccggcaaaagatgaaaggccggtttgagaaaaaagaacaggtaatgctttttctgaacagaagaggatacgcaggttttgtatcctgccggtcctgtggacatgtgatgaagtgtccgcattgtgatgtttctctttcggagcataataatgaaaggcttttatgtcattactgtggatatgagacaggaaaaccccggatatgcccggtgtgcggatcgccttatattggcggatttaaggcaggaacacagcagatcgagaaggtagtgcgggaagattttccagaagtcaggactctcagaatggattttgatacaacaagaaccaagggcagctatgaaaagatccttgcagcttttgctgctcatgaggcagatatactgatcggaacgcagatgatcgttaaggggcatgattttccggatgtcacactcatgggaatagtagcagcggatctttcgctgaatgcagaggattatcgatgtgcggaacgtacctttcagcttctctgtcaggcagtcggccggggaggacggggggaaaaaccgggagaggcagtgatccagacctatcatccggatcattacagtattcaggcggcggcagtgcaggattatcaggcattctatgaggaagagatgagttaccgtatgcttctggattatccgcctgcggcacatatgctggcagttctgggttcaggtccggaagatgagaaactggttcaggcaatgtattatctgaaactttatatagaaaggatatacagagaaaatgacctgcatatcattggcccggcatatgcgtcagttggaaaagttaaggatatttacagacaggttatctatttaaaacataaagatcataaaacgctggtacatatcaaagaccagctggagaaatacatagagataaattccggtttccggaaaatatacatacaatttgatttcagttaattatggcagattttttcaaaatctcattactgaagtaatctgctgcagaagggaaatccggaaggcagtaatttctgaaatcgtgatataacaataatcaagatatcaggttaggggcaaaatatcttttgattctaacatcataatcaaagaagaggagaataaagaaatggcacttagaaaaatcagattacagggcgacgaagtacttgcaaaggtcagcagaccggtagaaaaaatgacaccacgtattcatgatctgatcggggatatgcttgaaaccatgtatgatgcaatgggagttggcctcgctgcaccacaggtaggtatgctgaagcgtattgttgtgatcgatataggagagggtcctatcgtgctgatcaatcctgaaatccttgaaacatcaggcgaacagactggtgatgaaggatgcttaagtgtacctggaatggctggtcaggtaacacgtccgaactatgtaaaggtaaaagctctggatgaggatatgaatgaagtagaatatgaaggggaaggtcttcttgcgcgtgctttctgccatgagatcgatcatctggacggacatatgtatacagaactggtagaaggagaacttcatcaggtttcctatgatgaggatgaggagtgataatcaaatgaagatagtatttatgggaacaccggatttcgcagtgccgtcattacatgcactgacagaagccggatatgcggtggcagcagtggtgactcagcctgataaaccaaaagggagaggtaagacattattgccaacacctgtaaaagaagaagccgttatgcacgatattccggtatatcagccggagaaagtgagaaataaccctgaatttctggagattctgaaagaaatcaatcctgagatcatagttgttgctgcatatggacagattattccaaaagaaatcctggagcttccgaaatttggatgtatcaatattcatgcgtctcttcttccgaaatacagaggagcagcgcctatccagcaggctgtgatcgacggggaaaaagtatcaggtgtaacgatccagcagatgggagaaggtcttgataccggtgatatgatttcaaagatagtgattccaatctctccgacagaaacaggtggaagcctgtttggaaaacttgcgcaggccggtgcggatctgctgatcaagacgcttccgtctattgagcagggaaccgcggagtttgaaaaacagccggaggagagtcctacaccttatgcggctatgatcaccaaacagatgggactgatggatttcagaaaatctgcagaagaactggaacgccttgtacgcggcctgaatccatggccaagtgcttatacatttcttaatggaaaaactctgaaagtgtggaaatgtaaagtcagcactgagaaaacagatgctgttccgggaacaatcttcctggcagataaagaggggatccatacagcatgtggagaaggagtgctgattcttacagaggtacagctggaaggtaagaagcgtatggaaacagaagcctttctccggggatatcacattgaaaatggaattgtttttacagatcataaggagtgattagatgtacggatattattattttgatcctacgtatttactgctcgttatcggaatggtgctgtctttactggcatctgcaaaggtaaagagtacgttttctgtttacagcagagtgcgcagtgcatcggggcttacaggtgccgatgctgccagacggattcttcgtatgtcgggaattacggatgttacggtagtacccatatccggcagcctgacagaccactatgatccgggaagtaagaaactggcactttcccaggatgtatatgataaaacatcggtggctgcgatcggagtggctgcgcatgaatgtggacatgctattcagcatgcggctaactatgtgccattgaatcttcgctctgcgattgtgcctgttgcaaacatcggttccacactttcctggccattgtttctggcaggactgattttctcaatccgtccactgctgactgttggaatcattttgtttacatttgcggttctttttcagcttgtaactcttccggtagaatttaatgcatcttcaagagcattgaaaatgcttggaagttcaggaatgcttggagttgatgaggtaaaaggtgcaagaaaagtccttacagcagcggcactcacctatgttgcagcacttgcttcatcaattctgcagcttttaagactgatcatacttgccggaggaagagaccgtgactaatggaataaatacaagagaactgatattacagatattactggaaattgaggaagagggaaaacacagccatattgcaatccgcaatgctctttccaaatatcagttccttccaagacaggagagagcttttattaccagagtctgtgaaggaacactggaatatcgtattgtaatagattatattattgattcatattcaaaagtatctgtagataaaatgaagcctgtgatcagggaaatcctgagaagtgcagtttatcagatcaggtttatggacagtgtgccggacagtgcagtgtgtaatgaagcggtgaagctggcacagagaaaaggcttttacagcctgaaaccttttgtaaacggtgttcttcgtacgattgccagagagtggaaaaatctgaaacttccttcaagggaagaaaatcgggtcagatatctgtctgtcagatattctatgccggaaacactggtaaaccgttggcttgaggattacggggaagaaaaaacagaaaagatccttacagattttctcactgagaaaccgatcacagtacgctgcagaactcataaatatccacagaaagagatttatgagagcctggtcgatcagggagtggaagtgaaacctgcaccttatcttccctatgcatatgaaatttcaaattataaccatattcttgcactggatgcatttatacaggggaaaatccaagtgcaggatgtaagctccatgctggtggcagaaattgcagatccgcaaaaaggggattatgtgatagatatgtgcgcagcacctggtggaaagagtctccatattgcagataaaatgggagattacggaacagtagatgcacgcgatatcagccagtacaaagtggatatgatcgaagagaatattcacagaacagactgcattaatgtgcaggctcatgtgatggatgctacggtatttgatgtagattcagaactcaaggcagatgtcgttctggcagatgtcccatgttccggatatggagtaattggaaagaagccggagatcaaatacagggtgactgcacagaagcaggaagagattgtaatccttcagagaacaatccttgacaatgcggcagaatatgtgaaaccgggcggagtgctggtatttagtacctgtactatcgcaaaggaagagaatgaagagaacatgttgtggtttatgaataatcatccgttcaaactggagagtattgatccgtatcttccggaagaactgcattctgagacaacagctctgggttatcttcagcttctgccgggagtacacaaaacagatggcttctttattgcaaaattcaggagaaaataagtaatgacagacattaagtcaatgacgatcgacgaattaaagaaactgatgaccactctgggagataagccttttcgtgcgaagcagatttacagctggctgcatgaacaccttgttacttcttatgatgagatgaccaatctttccaaaagcctgagggaaaaactgaaagaatatcctgtcacagcactgaagatggtagatgtacagacatcccggattgacggtacacagaagtatctgttccgtctcagtgatggaaatgtgatagagagtgttctcatgcggtataaacatggaaattctgtctgtatttcttctcaggtgggatgccgcatgggatgcagattctgtgcatctaccataggaggactgaccagatgtcttctcccgtcagaaatgctggatcagatatacaggatacaggctctgacaggagaaagagtttccaatgttgtggtcatgggaacgggggaacctcttgataattatgaaaatcttctcaggtttatacatatcctgacagaagacggaggacttcatatcagtcagagaaacctgactgtatctacttgtgggctggttccgaagatttatgaccttgcaaaagaaaagcttcagatgacacttgcactttcccttcacgcacctaatgatgtgaagcgacgggaactgatgccgatcgcaaacaaatacagcatggatgaggttctggaagcctgccgttattattttaaagaaaccgggcgcaggatcacatttgaatacagtctggtagccggagttaatgacagcgatgaggatgcaagggaactttccggcagaatcagagatatgaactgccatgtaaatctgatcccggtaaaccctattaaggaacgttcctttgtgcgttcaacaagacaggctgtggagaatttcaaaataaaacttgaaaaatgtggaataaatgttactattagaagagaaatgggcagtgatattgatggtgcctgtggacagttaagaaaaagttatatggaaaaaacagaaagcgagaagtgacatgaggatatattcagctactgatgtcgggcaaaagcggaagatgaaccaggattatgtgttcgcaactgctgacccggttggaaatcttccgaatctgtttgttgttgcagatggtatgggtggtcataatgcaggtgattatgcatcctctcatgcggttacatccatggtggaggaaatccggcaggatgcggattttaatccggtaaaggtaattcgtcatgccattgaatgtgtaaataccgagattcttacccaggcacagcaggatgagaaactcagaggaatgggaacaacgatagtggcagctactatcgtaggacattacgcttatgtggcaaatgtaggtgacagcagactttatgtgatcggagagaagattcagcagataacaagggatcactcactggtgcaggagatggtaagaatgggagaacttgaccctgaacaggcaaggaagcatccgaagaaaaatatcattacaagagcacttggagcagagaaaacagtggatattgatttctttgatctgaaactggaacccggagatgtagttttgatgtgttcggacgggctcagcaacatggttgaggacagccagctgagggaaatcatttctgacacatctacagatctggatgaaaaaggcaggatacttataagagaagcaaaccgcaatggcggcaaggataatattgcaattgtattggtagaaccattcacagacgaggtgaaagcatgttaaaaacgggaatgatcatagcagaacgctatgagatattaggaaaaattggtaccggcggaatggcggacgtatacaaggcaaaagaccataagctgaatcggtttgttgctgtaaaagttcttaagccggaattcagagaggatacgacgtttatccgcaagtttaaaagtgaggctcaggctgcagcagtcctgacacatccgaatatagtgaatgtatttgatgttggtgacgataacggagtttattacattgttatggagcttattgagggaattactctcaaggagtacatttccaaaaagggaaagctttctgtaaaagaagcaaccagtattgcaatccaggtctccatgggactggaagctgcacacagccatgggattgtacatcgtgatgtaaaaccgcagaatattatcatttccatggatggaaaggtaaaagtaacagattttggtattgcaagagccgcttcttccaataccataagctcaaatgtaatgggatctgttcattacagttcaccggaacaggtcagaggcggatacagtgatgagaagagtgatatttattcactgggtatcacaatgtatgaaatggttacagggaaggttccttttgacggagataccacagtagctattgctatcaaacatcttcaggaagagattgttcctccaagtgtttatgcaccggagcttccccacagtctggagcagatcattctgaaatgtacacagaaaagcgtggatcgccgttatcagaatatggaggatgtgatcgcagatctgaagcattctctgatcgatccacagggagatttcgtaacgctgacgtctgtggataacgaagcaaaaacagttgtgatctcagataaggagcttggcgagatcaaacatatgccgaagcagatcgcaaagtcagaacctgaggctctggaagaagaaatcaatgaaacagattatgatgatgagccggaagtgaaaaagcacaggaagaaatcagataagcctgagaaaaagaaaaaaggaggcggacatgggctgactattgtaatgcttctgatgggtgttgtgattctgatagcaatcattctggtcgcaggaaaggcgtccggacttattggaagtaacaatgatacagacaaaaaaactgaggcccaggatacatcggaatcagatgatgacggaatgataactgtgccgaatctggtaggaaaaacagaggatgaagcaaagaatatcacaaaggatatgaaactgggtattcagcctatgggcgaggaggcttcaaatcaggcaaaaggaaccatttcttcacaggatattccaaagggaagtaaagtagagcagtatacgaccattaagtattatatcagcaagggtgcgcagaagatcacaattccggatgtggatggacagaccggagtagacgcacagcagactctggaagatatgggattaactgttgagatacagaaagaatacagtgaattaaatgatgatggtactccggttacagatccgggatatgcagtctccacaactccggcagccggaaactctgtttcagcaggggacagcgtaacactgcttgtcagtcgaggcgtggactatggagacagtgtggaggttccaagtgttgtcgggatgacaaagaatgatgcagttactacttttggtaagttcctcaatgtggaagtaaaagaggaaaagagtacagaggtggcagaaggagaagtaatctcacaggaaccggaagctggaaactgggaagatccggataatgtaaatgttgtgatcacagtaagtaccggagatcaggaaccttcggctcagagtgacagcgcagatactgctgcatcatctgatgctccggcacagacagcagataacagtgcggcggcagcagccggggaagtatggaaatgtacacagactctgaatactccgtcaggatattccggaggtccggttcgtctggaactgatccagaatgtaaacggaacaccgacagcttcagttgttctggaagatcaggtaatccagttcccgtatgatctggatatcacaggtgcacctggtatcagcgagggtactttgtatctgtctgaacagattagcggaacttatcaggaactcggaaattattctattacatttgctaaggctgaatgatccatgcagggaaagataataaaaggaattgcaggattttattacatctatgcagaaaatgatgagatttatgaatgcaaggcaaagggaatattcagaaaagataaacagaaacctcttgtaggggataatgtggagatagaggttttggatgaacaggagaaggaaggcagtgtgactgccatccttcccagaaaaaattcattgatccgtccggccgttgccaatgtggatcaggcttttgtgatttttgcgatggagagtccgaaacctaattttatgctgcttgaccgttttctgatcatgatggagaaagagaatgttccggctgttatatgttttaacaagaaagatcttgcaaaacaggaagaactggagtttttatatgaaacttataagagctgtggatatgatgtgattttttccagtacttttaatggagagggactggatgagatacatgagatcctgaaaggaaaaacaactgtagttgcaggaccttccggtgtaggaaaatcttcaatcaccaatgcactgcaggaaaatgtacagatggaaaccggggagataagtaagaagctgaaacgtggaaagcataccacgcgtcattctcaggtgataccggtgggacatgatacttatctgatggatacaccgggattttcttctttatatctgacagatatagaagaacaggaacttaaggcgtattttccggagtttcgcagatatgaagaacagtgcagatttcagggatgcagacatatccatgaaccggactgtggtgtgaaagcagcattggctgagcatgagatcagccagcttcgctatgaagattatctgggactttataatgaattaaaagagaaaaggagattctaattatgtatcagttgtgcccttctattttatcggcagattttaaccgtttgggcgaacagatcaaaaccctggaaaaagaggggattgaatggcttcatattgatgttatggatggtgattttgtaccgagtatttcttttggaatgccggtgataaagtctatccgaaaggaatcaaagttgttttttgatgtacatctcatggttacagagcctgagagatatatcagagattttgtggaatgtggggcagattccattacagtacatgcggaggcatgtgaagatcttgagagaactattgaacagatcagggaagcaggtgtgaaggtgggggtttccatcaaaccggctacacctgtaaatgatataagccatatgctcagcgatgtggatatggttctgatcatgactgtacagccgggatttggcggtcagaagtatatggaagaatgtacggagaagatcagggaagtacgtgaactgatcgaggccgaggatctggatgtagatgttcaggttgatggtggcatcaatgatgagacaatggagacagtgctcacagcaggtgcaaatctgctggtagcaggttcttatgttttcaacgatgatctggcaaaaaatgtaaaacatgccagagaacgaatggatgagatcataagaaggattgactgaggaagagcatgatagatacgataattgtaagcgggggcaatatccacagtgattttgccctcgattttttaaaaaagaatgaagcctgtctgatcgcagctgataaagggctggaattctttctggagcatcagcttttgccggatgcagttattggagattttgacagtctgtctgaagatggaaaaaaattcctggaaattcatgaagaaagaagtatggacagtgaaattccctatggtggaatgactgagtggaaattgcaaaaaggctttggaaatgaaaaaaaagaaataaaagttatccgcctgagaccggaaaaagatgactcagatacacagtctgccatgaattatgcaattcaaaacggtgcaaagcggattacaattcttggagcgaccggaaacagagtggatcatctgatggcaaatttcggacttcttgttctggcaaagaatcagggagtggaagtaatactggcggatcagtataattatatgaaacttgtttcagatggagaaatcataaaaaagtcagaacagtttggaaagtatatatcattttttccattaggaggagatgttacaggactgacgctggagggatttaaatattcacttgaccattatcgcctgacaacagcagacagtggactgacagtgagtaatgagattgtcagtgaaaaggcaaaagttacctatcagtctggaacattgcttatgatcatgtcgcgggattaagcgtgtcgcggtaataccgcacttgcacataataagtggttatgctagaataatgaaagtatagtaaaaacatctgaaaataccgtaaaatcaatacatttaaaggagatatttagagatatgaaattaggaatcgtcggattacccaatgttggaaaaagtacattatttaattcattgacaaaggcaggcgcagaatctgcaaattatccgttctgtaccattgaccctaatgtaggtgttgttacagtgccggatgagagactgaagcttctcggagacttttatcattctaagaaagtgacacctgctgtaattgaattcgtagatattgcaggacttgtaaagggagcatccaaaggagaaggccttggaaaccagttccttgcaaatatccgtgaggtagatgcaatcgttcatgtagtccgctgctttgaagattccaatgttatccatgtagatggaagtattgatcctatccgtgatattgaaactattaatctggagctgatcttctcagaccttgagatccttgagagaagaattgcaaaagttacaaaaacagcacgcatggacaaagaggctgccaaggagcttgatttccttcagaaggtaaaaacacatctggaagatggcaagatggcaatcactatggaaatggaaaatgaagatgaagaagcctggatgtctacttataatctgcttacctggaagcctgtgatctatgcagcaaacgtagcagaaggagatctggctgatgacggtgaaagcaacagccatgtacaggcagtgcgcaaatatgcggcagagcagaacagtgagattttcgttatctgtgcagaaatcgaagaagagatctctgaactggatgatgatgagaagaaaatgttcctggaggatctgggactgacagaatcaggacttgagaaacttgtaaaagcaagctatcatctccttggactgatgagtttccttacttcaggtgaggatgagacaagagcatggacgattaaaatcggaacaaaggctccgcaggcagcaggtaagatccatacagattttgaaagaggatttattaaagctgaggttgtaaattatcaggatcttctggactgtggttcctatgcaggtgccagagagaaaggtcttgtaagaatggaaggtaaagaatacgttgtacaggatggagatgtgatcttattccgattcaatgtatgatgaacaggtgatttatggaaatgtcgatacgttttccgggacttggcctggtctttaattatgtgccgcgctcatttcagatatttggaatggaattcaccatatatggagtactgattgctgtgggtgctcttcttggaatgggacttgtgacacttgaagcgaaacgaaatggggaagatcagaacaggtatctcgatatgatgcttatctccctgctggtttcagtagcaggttccagattattttatgtggctttttcatggggattttataaagaaaatctgaatgccatactggactttcgaaatggcggttacgctttatatggtggtctgctctttggatttcttgcggcagcggtattttgcaggattaccaaaacgtcattctggcagagtgccgatattgcgtgtcccggaatacttctgggacaggctatagggcgctggggtaacttttttaacagagagtctttcggagaatatacagatctgccatgggcaatgcagataccggtttcagctgtgcggtcaggagaagtttcgggagcaatgagagataatctgctgactataaatgggatttcatatattcaggttcagccgatttttctttatgaaagtctgtggtgtctgctgttatttctgctgttgatggccatgcgccgaaaaaagaaatatgaaggcgaattgtttatgatctatctggcaggttatggtctgggaaggtttttctttgaatggttcagaacagataagctttatattccggggacaaaagtggggatttcgctggtaatttccgctatattatttgctgtttttatgcctgtagtgatcatacgcagagtgatggcacagaaaagagatactatacgccggcagaggagaaaaagatttctggatgagtcagtgaaagaaaaacagatgtttcctgagacttctgaaatgaaaccggaaccggaaatccggccggagatggatgaacaggtaaagccagatgtgggaaattctcccacaaattcaaaagaagaacagtaaaaaaacatatatctgaaagataagtgggttgaaagtggaaattcaacccactttttgtgtataaaagcccatttttctcgtaaaaataaggttgtttcataaatgttaacagagttctaaattttaaaaatctttttctcccccttgttttttcagcctaaatagtttagaataagcacataagtggtagaaagtggtgaatagtggtggtgagtggggaataacggcagagtccattaccacctgagaaatctgaaggggagattcagattttgcgagagtaggtgagtaacatgttcatgggagagtataaccacacgatcgacgcgaaggggcgtctgatcattccttctaaattcagggagctcttaggggaagagtttgttctgacaagagggcttgatggctgtctttacatttatccgatggatgaatgggaatcctttgaaatgaagctcagatctttaccacttacaaataaaaatgccagaactttttcacgattctttgtagctggagcaactacatgtgaactggacaggcagggacgaatccttgtaccgcagacactgcgcaaatttgccggtctggagaaagatgtggttctgacaggtaatctgaacagaattgaagtttggagcaaagaaaaatggaatgagatctgtgattatgatgacatggacagcattgcagagagcatgcaggacatgggaatcacaatctgacaggtctcgtttgaagtatcttgcaaagtaaatccagacaggagacggagatggaatttaaacacaaatctgtattactggaagagaccattgaaggtttggatatcaaaccggacggaatctacgtggatggtactttaggaggtgcagggcatgccggtgaggtatgcaggaaactttctgccaaggggagatttattggcatagatcaagaccaggatgcgataattgctgcgagtgagaggttagccccctataaacaggcgacgatcattcgcagcaattattgttacatggtacaggaactggcagcaagaggcatctataaagtcgacgggattctccttgatcttggagtatcttcctatcagcttgacaatgaagaacgcggttttacctacagggtagatgcaccgctcgatatgcgcatggaccagcgccagacgcagacagccggcgatattgtcaatggctatgaagaaaaagaattataccgtattattcgtgattacggtgaagataaatttgcaaaaaatattgcaaaacatattgttgccgccagacaggtgaaaccgatcacaaccaccggagaactgacagagatcatcagagaatccattcccatgaagatgcaggtgaagtcaggacatccggccaagagaacttttcaggcaatccgtattgagcttaacagagagctcgatgtgctgcgggattctctggatggaatgatcgatatccttgatgatggcggaagactttgcattatcacttttcattctctggaggacagaattgtaaagacgattttcagaaaaaatgagaatccgtgtacctgcccttcagattttcctgtatgcgtatgcgggaagaaatccaaaggaaaagtgatcacaagaaagccgattcttccgggggagacagagatggaagagaatccgcgttccaaaagtgcaaagcttcggatttttgagagagtattataattagagaggcatgaaatggcgagaacgaccaggagtgaaacagcaagaagaagcagaaccagtgccagaacaaacagaggaatgtatgttgacggaaatacggtcagacgtcttgcagaagttccggagagaaagaggcagccgggaagacagaatccgggaaggcagcagaccaatcgaaaccgaagagtgcaggcgagtcctgcgcaggtaccaaggcagaaacatcagttgagtaaagaagcacagaagaacaggcagaaggcgactgcaatgaactggggatttgtagcgtttctggcagttgtatgtgtggcgatattattctgctctgtgaaatatcttcgttacaaatcagagattaccgcaaagatgagtacagttgcatctcttgaggaggaactggcagatttaaaagaagacaatgatgcatattacagccaggtgacatcaaatgtggatctgaataagattaagcagactgcattgggaagactggggatgaaatatccgtcagatgatcagacagtaacctattctacatcgggtaacagctatgtaagacagtatcaggatataccagattcaaagtaggtgattaattgagcaatacgggaagaaagagtcgaagaagaccacagagaaaaataaatcaaaacatgaaagaaaagctgctgatattgtttggaattgtgttactgcttctggtaatattagtgctgagaattacttatattaatgctaccagtggaagcaaatacaaaaaacaggtgttaagtcaggcacagcagaaatatgagagccaagtactgccggcaaagagaggcgatatttatgacaagaacggaaatatactggctaccagcaataaagtttataatgtgatcctggactgtaaaactgtaaattcagatgaggactatgtagagccaacaatacgtgccttaaatgaggtgctggggattgatgaagaaacagtgcgttctcttttggccgattcaagaaccagccagagtcagtatcaggtactaacaaaacagctgtctatggacaaaaagaaagaatttgaaaaatataaggcagaggatgaagattccggtcttactaaagcgcaggcaaaggaacgggcaaatatcaaaggcgtctggtttgaagaggattatctgagaagttacccgtttaatgaaacagcatgcgatacaattggttttgcactggacagagatgtggcagatatcggactggaagggtactataacagcacactgacaggcgtagacggaagacagtatgggtatatcaatgatgattcagatgtggagcagaccattattgctgcggtgaatggaaaaagcattcagaccagcattgacatcggtgcacagcagattgttgagaaatatgttaatggatttaaagaggcaatgggggccaagaatataggtgtcattgttgaaaatccgtccaccggtgagattattgccatggatggtggtgaccgttatgatctgaataatccgagagatctttccactgtatatacagaagatgaaatcaaagcgatgaatgatgtggaaacagtggaggctctgaatggtatgtggagtaatttctgcgtcacagatgcctatgagccgggatctgttgtaaagccgatcgtcatggcttctgcattggaaaagggtgcgatacaggaaacagatacatttgtatgcgatggatcgcagacttttggagatactatgatcaagtgtgcggtttatccgagcgcacatggcacagagacactgggagaggtaattgcaaactcctgtaatgatgcaatgatgcagattggcgccaagatgggagctactcagtttatcaaagcacagagtctgtttaatttcggaacaaggacagggattgacctgccgaatgaaggcgcaggtattatccatactaaggacagtatgggggaaacagaacttgcatgttctgcttttggacagggttttacctgtaccatgatccaggaaatcaatgcgatgagttccgttatcaatggcggatattattatcagccgcatcttgtgacaaaggttcttgacagtaatggcggaactataaaaacaatctcgccgatacttctgaagcagacgatttcctccaggatttccagtgatatcagaagctatatggcattgagtgtacagcagggtaccagccgtcattccaaagtgcagggttacagttcaggcggtaaaacaggtacagcggagaaatacccgcgaggaaacggaaaatatctggtttcttttattggatttgctcctgtagatgacccggctgtggtaatttatgtagttgtagatgaaccgaatgtagaggatcaggcaaacagtacttatccgcagtatattgcacagggaatcctttcggagcttcttccgtatctgaatgtagtgccggatgaatctgaagatggaacagtgccggagacagaattgtgggaagggtttaagggacatttaaagagtacttccatatcggacagcgaacttgacagtgacggtaatctggtggatgcagatggcaatctgatagactgggatggaaaccggattgatgaaaacggatatctgctggatgccaatggagatcacatattggatgaggaaggcaattataagatgtctacaaatcttgtcagtgcttcgggaagtacggatgcagattcttcaggagatgcagtatccaatcctgatgcacctgcacctctggaggatgatgaagctgagacgactgaggataatgacgaagagacagacggtattaccaatgaagaagcaggtctggaataaaaacgtatagttatagctccgcagagaatggtcatatattgttatgacaatctctgcggagctttttttatgaaaaaaaatatgacgtttcacaagagaaaaatatgggtggtattactctgctgtattttaatgatgacaggccttatcggaagactggtatatcttatgtgtttcagatcagactattattataagaaagcaaaagaacttcacgaaagagagagagagatcaaagcggccagaggggagattctggatgcaaggggaaaagttctggcatcaaacaggacggtatgtacaatctctgtgatccacagtcagattaaagaacctgaaaaagtaatcgccctgctgtctgaaaaactgaaaatagatgaggcagaagtgagaaaaagagtggagaaaatctcttccatagaaatagtaaagacaaatgtggaaaaaagtacaggtgatgagataagagagtgcagtctggcaggggtgaaagttgatgaggattataagcgttactatccatgtggaagtctggcttcaaaagtcattggctttacgggaggtgataatcagggaattatcggtctggaagtgaaatatgaagaaatcctgaggggacagccgggtaaaatcctgacaacaacagatgccaggggtgtggaaattgataaattgggtgagacaagggaaaaaccgatagagggtaaaagcctgatgatcagccttgatgtaaatattcaggaatttgcgcagcagtcagctttgaaagtaatggaggaaaagcaggcagaacgtgtatctatcctgctgatgaatccacagaacggcgaaatatatgcatgtgtcaatgtgccggaatttgacctgaatgatccttttaccctgacagatgatctgaatatgcagttaaatgaatccgggataacaataccgtcggaagatcacaatgaacaaagtgaactggcagtgcagacagcatcaggaaaaacaaatacagaaagaaagcaggaattactgaatcagatgtggagaaatccctgcctgaatgatacttatgaaccgggctccacatttaaaatcatcaccatggcagccggactggaggctggtgttgtttcacctggggaccgtttttattgtcccggatataaagtggtggaggatcgcagaatccactgtgcaaaaagaacaggacatggatcccagaattttgtggaaggtgcacagaattcctgtaaccctgtgtttatagaggtggggcttcgccttggtgtagaacgttattataagtatttcagacagtttggacttctggataaaaccgggacagatcttccgggagaggcaggaactattatgcatcagaagaaaaatatgggagaggtggaactggcaacggtttcttttggacagtcttttcagattacacctgttcagctggctgcaacagtaagttcacttataaacggaggcagacgggtgacaccgcattttggagtcgcagtgttaaatcctgacagaacagagggtgagaaactgatttttccggtaaaggaaggaattgtctctgaagagacttcgaaggaaataagagaaatcctggaaacagtagtatctcagggctccggaaaaaatgcaaaaattgaaggatatgctatcggtgggaaaactgccacttctcagacactgccaagaagtgcaaatcgttatatttcctcttttttgggatttgcacctgcagaagatccgcagatactgggtctgtgtattattcatgatccgaaaggaatctattatggagggacagtagctgcacctgtgatacgtggtatttttgagaatatcctgccatatcttggaattgaaaaaagtgatgtttctgatttttctgcagaaggcaattagggaaattccgcaggcagggttgataaataagcaaaaaagccttatactaaaagaaatctgaaagtaaaaaactttcaggaaaaaacgaaagaatgaatgaggtgtaagatggaatttcaagttgtaatccctgtgctgatttcttttgcaatcagcgttgtattaggaccggtcatcattccttttcttcggagactgaagatgggccagacagaaagaacagagggcgtacagtcccatttaaagaaagcaggaacacctacaatgggtggagtgatctttctgatcgccacagcgataactgcattattttatgtaggggattatccgaagatcattccggtactgttcctgactcttggatttggaattatcggatttctggatgattatctgaaggttgtgctgaaacgctcagacggactgctgccatggcagaaatttttacttcaggtagttctgactgcgatttttgtattttatattgttaagtatacagatatctcactgactatgagaatcccattctggagcggacatttcctgaatcttggatggctggcagttccggttcttttctttgctgtgatcggtactgtgaatggagttaattttacggatggtctggatggtcttgcttccagtgtgactctgatcgttgcagtattttttacagtagtttctattggaatgaaatcggggatcgagccgatcacaggtgcagttgtgggaggactgatgggatttctgctgtttaatgtatatccggcaaaagtgtttatgggagacacaggttctctggcactgggcggttttgttgcaggtacggcttatgtgatgcagatgccgttatttatcctgatcgtgggtctgatctatctgatcgaagtactttccgttatcattcaggtaacttatttcaaggcaacacatggaaagcgtatttttaagatggcaccgatccatcatcattttgagttatgcggatggtctgaaacacgtgtagttgcggtattctcagttattacagcggttatgtgtatggtcgcactgctggcactgtaagattttggctaagcagatttcagcgttatgctgataaaagggaggaaaattattatggaattacagggaaaaaaggtacttgtattcggttccggaaaaagcggaatcggagcatctgaccttctggcaaaggtaggagcatttccggttatctatgacggaaatgccgaaacagataaagacgcagttgtacataaaacagatgggacatatccggtcactgtatatgcaggagaacttccgaaagaagtacaggacagtcttgatctggtagttttaagccccggagtgccgacagatcttccacttgtaaagagtttttatgagcaggggcttccggtatggggagaggtggaactggcatacagagtaggtaacggtgaagtgcttgccatcacaggaacaaacggaaaaactactacaacagcacttcttggaaaaattatgcaggatgcacgtgagtctgtttttgtagtcggcaatatcggaaccccatatacttccaaagcactggagatgaagccaaattctataactgttgcagaaatcagcagttttcagctggaaacgattgatgagtttgcaccaaaggtatctgcaatcctgaatattacagaggaccatctgaaccgtcatcatacaatggaagagtatatacgtgtgaaagaactgatcactgagaatcagggtacagaagatgtatgcgtgctgaattatgaagatgaggttctgcgtgagtttggaaaacatctgactccacgagtggtatatttctccagcggacgtaaactggatgagggaatttatctggatggaaataaaatcatcctgaaggacggagaaaaagaaatcgaagtagttaagacagaagatctgaagcttcttggaaaacataattttgagaacgttatggccgcagttgcaatggcttactacgatggagtatccttggacagcatccgtaagagcatctgtgaatttacagctgttgcacacagaatcgaatatgtgacagagaaaaaaggcgttgtatattataatgattccaaaggaactaacccggatgcggcaattaaaggaattcaggcaatgaaccgtccgacacttctgatcggcggcggttatgataaacagtccggttatgatgaatggattgaggcatttgacggaaaggtacgttatctggtgctaatcggtcagacaaaggagaaaatcaaagaagctgccgagaaacatggtttccatgacatcatcctctgcgaagatctgaaagaggcagtaaaggtatgtgaggagaaagcacagcctggagatgctgttttgctttctcccgcatgtgcaagctggggacagtttgataactatgaacagcgtggagatatgttcaaggaatatgtaagaaatctgtagaatatctataagtaagaattatagctgtccggcagagaaagacgaagctgcagtgaccggctatagataattttgcggagaaacagatggcgcgaaaaagagcgacagatttatcaaaaacagatatgacgatgctggtactgatagtactgcttgtgatttttggcctggcagtattattcagctccagtgaatataatggcagagtacgtttcggcgactctgcctgttattttaagaaacagttatttgccacagcattgggtatgggagtgatgtatatggtttcttccattgattatcatttttttctgaggctgggaccagtggcatatctgatttcaatgtttttgtccggcgcagtactttttgtaggtcaggagatcaacggctcaaaaagatggctgaatcttggacctttatcttttcagccttcagagtttgcgaaagttgctgtaatcctttttcttgcatggcagatcgagcgtaccaaaaaagcaaccaggggctttggatttatgtgcaggacaatattgaccctgctgccgatcattggtcttgtaggttcaaataatctgagtacagcgatcattattctgggtatcggtggaattctgatttttgtatccaatccgggatatctggaatttatcgggcttggcagcgcaggtgcaggtttcatagctgtttttcttgctgcagagagttatcgtctggaacgtcttgcaatctggagaaatccggagaaatatgaaaaaggatttcagacgatccagggattgtatgccatcggcagcggcggaatattcggcagaggatttggaaacagtctgcagaaacttggatttgttccggaagcgcagaatgatatgattttttcgattatatgtgaggaaatgggagcagccggagctatctttctgatttttctgtttgcaatgcttctgtggcggctgggtgtggctgccatgcatgcaaaagatctggccggagctcttatctgttgcgggattatggggcatctggctcttcaggttattttgaatattgcagtggtgaccaatacaatccccaatacaggcattacgctgccttttatcagctatggaggaacttcggcagtgtttcttcttggggaaatgggacttgcgatgaatgttgggaaatgtgacaggataaattgaattacaggtttcagaatgacgtaacatataatagaaaaagccataaactgtaaagtaagagactctttgggagcaaaaggttggatgaaatccatgtgacaggtaaagcttctctcagcggagagatttttatacagggatctaaaaatgcagcacttccaatgatagccgcatctctgatgcacagaggactaagcattctgaggggatgccccagaatttcagatgttttctgtatggaagagattttgaaaagtcttggtgcagtgacctggtgggacgatcatgatctttatctggattgttcctgcgcagacggaacagaaattcctgcagtctatacaggcagaatgcgttcttcgatcattctggcaggtgcggtgcttgcaagaaacagaaaatgcaggatagggtatccgggcggatgtacgatcgggaaaagaccaatagatctccatcttatggcactgagagcacttggcgcggatgtccgggaaaatgcatcaggcctggatggagaatgtgtcagatttgaagggcaggatattgtgtttccgaaatcgagtgtgggagctgctcaacaggcaatactggcagcagttcttgcaaaaggtgtaacacatctttataattgtgcgaaagaaccggagattttctggctctgcagatatctgaaaacaatgggagcactgatagaaggagaggaaaccggtgaaattacgatcagaggagtggatgaactgaaaagcggagactaccgtattcctccggatcgtattgttgcaggcacctatctgtgtgcggctgcggcagcaagaagtaagattattcttcataatgtacctgtggaggaattgcagtcgtttatggaagtatatcggaaaataggtggacaatatcaagtaaatggtggtacactagaggtcaatggaaagaatgctgtcagaccggctgttttagtagaaacggaaatttatccgggttttcccacagatctgcaggctccgttgatggcagtactgacaggtgcgcagggacagagtaccatacgggaaaatatttttgaccggagatttggcagtgcttttcagatgaaaaaaatgggcgcagatatttccgtaagcggaaaccaggcaatcataagagggggaaaaactcttaagggaacacaggtacaggcaggagatctcagaggtggtgcagccctgctcattgccgcacttatggcagagggagaaacctgtgttacaggagccgggtttatcagcaggggctatgagcatatctgtgaagatttacggactttgggctgcagaatatggcagccgtggacagaggatttgaggatttatgagagaaagtaattatgggaaaagacctcctatgagcaaaaggacgaagaagatgctggcaggtatgataggcgccggagttatggtcgctgtgatagtatttttttcctattataaagtagatactgttgaggtgaggggcacttcccattatacagacgaagaagtaaagaatatggtgcttcggggaccgatggcttccaattcggtccttgcaccactgctctacagcactacaaatacagaggacattgcatatgtagatgcatttaaagttacccagctgaaccgaaataccatctgtatcagcgtaaaagagaaaaaaacagtcggatgcatccgatatcttgacagttacatttattttgacagaaatggcatttttgtggagggttctcagaacagagatgagacggttccgtattttgacggaattcaggtgaacagcatcgtgatggatgagaaactggatattaaaggagatactgtactgaatacagctgtagcattgtctacaatctttcagaaaaatgatatgatccccgatcatatccagtttgacagcagctattctatcagcctcatctatggggatataactgttcagcttggaaaagatgctgatctggaagagaagatgaaccgagtgatagcgattctgcccaaaattcagggaaaaaaaggtattcttcatatggagagtgtggctacggagtccaatacctttgaagaagaactggaacaggaagaagttactgctgagaattggaatggcggttatgatgaagatggcaattataccggagacggcgagtatgacgaggatggtaattatgtaggtgcaaaaccgaagactgctcttgaggaagcaattgagaactggaatggcggttatgatgaggaaggggattataccggagcaggtgagtatgacgaatccggtaatcatgtgggaccgaagcctacacaggaatctctggatgcggcatctgatgagtcgggagatggttcaggagatgaaagttccgcagatgaccagagttctgaaacttcagaagatggagaaagtgattcatcatatgacgacggaaactcagatgattcagatggatatggtgattatacagaagataacagtgattatcagggggatgattctgagggatattgatagtatatggaaactttgagatcagagaaggctccgtacactgatacaacatatttaccggaattgccgaaaaagagtgaaaaaagtataaaaaaacaaaattaatggttgattaattctcaaaaaaaatatatgatatatctatatgtaactttgatataaatcactgaaaaggatatcaggtataaataaaggaggaagtacgttgttagagattatgtcaaacgaggctgaatcatctgccaagatcatagtgatcggtgtaggtggagccggaaataatgcagtaaacagaatggtggaagaggccatcggcggagtagagtttgtaggtgttaatactgataagcaggctttaactctgtgcaaagctccaactgtacttcagattggcgagaagattaccaaaggtcttggtgcaggagcccagcctgaggttggacagaaagcagcagaggagagcattgaagaagtaaaacagttaatggaaggtgcggatatggtattcgttacctgtggtatgggaggcggaaccggaaccggagctgcacctgttatcgcagcagcagcgaaagaaatgggtatccttacagttggcgttgttacaaaacctttccgttttgaagcaagaactcgtatgaataatgcacttgcaggcattgagaatctgaagaaagcagtggatacattaatcgttatcccgaatgataaattactggaagttgtagatcgcagaacaaccatgccggaagctctgaagaaggctgatgaagttctgcagcaggcagtacagggcattacagacctgatcaatctgccggctctgattaaccttgactttgcagacgttcagactgtaatgacagacaagggaattgcccatatcggtatcggtgaagcaagaggagacgacaaagctatggaagctgtacagcaggccgtatcttctccacttcttgagacaaccatcaaaggtgctacacatgttatcattaatatttccggagatatttctcttatggatgccaatgatgctgcaagctatgtacaggagcttacaggtgaggaagcaaacatcatctttggtgccatgtatgatgatacagttgctgactactgcagaatcacagtgatcgcaacaggtctgaatgatgataaccttcagcagacccctttcggaaaaagaagcacagcttcttcctttggtgcaagaagaccttcttccacagcaacgacaggtacagcaacagccggaactgcagcaggaagcggtatgaacatgcctagcttcagccttccaactatgaatgccacaccatttggagcatctaagactccgtcaagcactgttcagaagaaggatatccagattccggatttcttaagaaacagataggattatctgttttgcagtgaaataatttacagacagacaaaagagacatattccatatagatggacatgtctctttttttgaccggatcagggaagttcattatccctgatatacgggtgaaaatcctgttgccatggtgttgatattatgcgccacaatggcactggaaggtgtcacatcttgtatcggaagatgcatgtgcattagagccgtctacctgaatggaggatgctgtacatttgcagttatcattataggtacagttatgggctttgcagtcgatctggattttgtcgcagccacagtcatctgtatagctgtctttcatggaactgccggttctctctcggaaactgccgcagcttgtctcatttgcagaagtagcattttcgcctgtcacgtcaatatcaccctttgaacagagctgttctttgttgtaaacacaggtcattgctgaacatttaagaattgtcatagagttaccctcctgaaaaaatctgagataactattcaatactactgtagtgcaagagtactgaacagttacattgaataagtttcggagataggatgtgcagtttgagagaaaatatacatgagatcgttactgttcactccgttcacagtaacgtagccaaaattcattccagattgcctgcggcaatggaattttggcctgtatgtctcgggattttggcatattcatgccaaaacacctcgcggaatagtggtgtgtgaacagtaagatgagatctgaaaaaattaaagaaaatgtaaaaagtacttgacatagcagactgaacatggtatcttatacaagtacgtaagaaaacaaagcagagttccactctcacctcagcgcatttagtttagcggcttgggtttatattgcacagagaaggctgatatttaaggttggcaggaataaggagattgttccgcagattaagaagaaaagatatcagcagtgtgatagcggagtgtggattttgtccacgctttttttatgtaaatgagggcgacgagaagtcattagaatctatctaacaggtatggaggtgcactacaattagcaatttaatgattaacgaacagatcagagacaaagaggtacgcttaatcggttcggacggagaacagcttggaatcatgtccgcgaaagaagcaatgttcaaagctcaggaggcagggcttgacctggtaaaaattgccccgcaggcgaaaccgccggtatgtaagatcatcgattatggtaaataccgttatgagcttgcaagaaaagaaaaagaagccaagaagaagcagaagaccatcgatgtcaaagaagtgcgactttctccaaacattgataccaatgacctgaatacgaaagtcaacgccgccagaaagttcctctccaagggtgacagagtaaaggtaacattacgtttccgcggaagagaaatggcacatatggcaagcagcagacatgtgcttgatgattttgcaaagcagcttgcagatgtggcaacagtggagaaggcaccgaaggttgaaggcagaagcatgaccatgtttttaacggaaaaacgttaaatataatagagatacagtttaaggaggaattaacaatgccaaaaattaaaacttgcagagcagcagcaaagcgtttcaaaaaaacaggtacaggaaaattagtaagaaataaagcttataagagccatatcttaacaaagaaatctcagaaaagaaaaagaaatctgagaaaatctactgttgttgatgctactaatgttaagagcatgaagaaagcattaccatatttataagaagcatttattcattgaagatagacaaacaggaggaaatttaagaaatggcaagaattaaaggcggattaaacgcaaagaaaaaacataatcgtacattaaaactggcaaaaggctacagaggagcccgttccaaacagtatagagttgctaaacagtctgtaatgagagcacttgctagctcctatgcaggaagaaagcagaaaaaacgtcagttcagacagctctggatcgctcgtatcaacgcagcagcaagaatgaacggattatcctacagcaaactgatgcacggactgaaagttgcaaacatcgacatcaacagaaagatgcttgctgaacttgcagtaaacgatgcagaaggatttacagcacttgctgagattgctaaaaaagcaattgcataattgtcggttttagagagacataagatttgataaattaaatcagaattttgaggtacacatagaaattgttacggtttctgtgtgtaccttttttaatgcatttttcgatgaatgggataaaattgcgtgcgcggtacggtcaagtgtccatgaaagacggaaaaatcttaaatttccataaagtttttcttgcatggtcaaatatatggtgatataattcaaaacagcaacatattaaagtgtcagtggaagccaaagccggctgggaacccagttggctttttgttacttttcagttcctctacataataaatgaacttgcggaatttataacatcaaaaatgatgtaccaggtggaatgaatggtaacggaagctaatcttatgagccgtaagagggacgaaaggactgacaaaatataaggaggattttattatgaaaaacctgaaaaaaatcatcagtgttactgcggcagcagcaatggtaatgtcaacagttgcacctgtatctgtatttgcagacgatgctacatttaagatcggtggaatcggacctgtaaccggagcagcagcaatctatggacaggctgtaaagaatgcaacagagcttgcaatcaatgaagtaaacgaagacggcggaatcaacggatatcaggtagagttcaaatttgaagatgatgaaaacgatgctgagaaaaccctgaacgcttacaacgcattaaaagactggggaatgaacgtcctggttggtacagttacttccacaccttgtgtagctgtagcaaatgaaacagcagcagacaatatgttccagcttactccatccggatctgcaacagagtgtgttgctaatccgaacgtattccgtgtatgcttctctgacccgaaccagggtactgcagcagctcagtacattggagagcataaacttgctacaaaagtagctattatctacgatagctctgatgtatattcatcaggtatcacacagaacttcacagcagaagcagctaatcagggtattgaaatcgtatcttccgaagcattcactgctgataacaataaagacttctccgtacagcttcagaaggcaaaagacggtggtgctgaattagtattccttccgatttattatacagaagcttccctgatccttgcacaggcagacagcatgggatttgaaactaaattcttcggatgcgacggtatggacggtatccttggtgtagaaaactttgatacatctcttgcagaggggctgatgcttcttacaccatttgcagcagattctacagatgagaaaacccagaactttgtaaaagcatacaaagatgcttacaaagacacaccaaaccagttcgcagcagatgcttatgatgcagtatacgcagtcaaagcagcagcagaaaaagaagatgtaaaagcagacatggatgttgcagatatctgtgcagcacttgaaaaaggcatgaccgagatcacacttgaaggtgttacaggtgacgagatcacatggacagaagacggtgagccgaacaaagctccgaaagctgtagaaatcaaagatggtgcttacgcagcaatggaataatgaaattgaaataactgaaaagatttcataagaaataaaatgcgattgttcctggagtggacaatggttgcatgccaacggggctgtctgaattatgcagacagccctgttgcctaatacgttattacattaatgcgttaatgacagatttacttttggcaaaataaacaagacagatttcgctaaaggcaaatctgccagttttacacacaataaaattatttaaatataagaaaggaaagacttctatgagtagttttatatcatatcttatcagtggtatcagcctcggaagtgtatatgcgatcatcgcccttggttataccatggtatacggaatcgctaaaatgctgaacttcgctcatggagatgttatcatggtcggctcttatgtagtttatgtcgcagtcagcggcatgggattaaatccgattttagccatcctgctgtccattatcatctgtacactcatgggcgttgtgatcgaaggcgttgcgtatcgaccactgcgtaatgcagcttcacctctggctgttctgatcacagcaattggtgtcagctacctgcttcagaacgtggcccttctgatctggggagcagataccaaatcattcagtaacgtgatcagtcttccatccctgaaacttgcaggtggttctatcgtgatcactggtgtaaccatcgtaaccattatcggtggtatcctgatcatggcaggtctgatgctctttatcagcaagacaaaaacaggacaggcaatgcttgccgtatctgaggataaaggcgctgcccagttaatgggtattaacgtaaacaaaacaatctccatcacttttgcaatcggttccggacttgcagcaatcgcaggtgtgcttctctgctctgcatacccgtctttgacaccatatacaggtgctatgcctggtatcaaagcattcgttgcagctgtatttggcggtatcggatctatcccgggagcctttatcggaggtgttgttctgggtatcctggagatttttggtaaagcttatatctcttcacagatggctgatgccattgtattcggtgttctgatcgtagttctggttgtgaaacctaccggtattcttggtaagaacattcaggagaaagtgtgaggtggcagacatggaaaagaagaaattaaacaaaacaacaaaaagcaatctcattacatacggaatggttcttgcagcatatctgatcgtacagggaatgatcgcagggaatctgctttccaacctgatgcagggtcttctggtgcctctttgtgtatatattatcctggctctttccctgaacctgacggttggtattctgggtgagttaagtcttggacatgccggatttatgtgtatcggtgctttcaccagtgcagcatttacaaaggcaactatggatacatttacaaatgcaggacttcgtttcttcgttgctctgatcatcggagctgtatgtgcaggtatctttggattcctgatcggtattcctgtacttcgtctgaaaggtgactaccttgctatcgtaacactggcatttggtgagatcattaagaatatcatcaatgtgctttatgtaggaattgacggcaacggaatccatttttccatgaaagaccagatgtctcttggaatggagcctggtggaaaaatgatcatcagtggtgccatgggtatcacaggtacaccgagacagtcaacctttactataggtgtgattctgatcctggttactttattcgtagttctgaacctgatcaattccagagacggacgtgcgatcatggcaatccgtgataaccgtattgcagcggaatcaattggtattgatatcacaaagtataaactgaaagcatttgcaatctcagcagcattagccggtatcggcggtgtgctttatgctcataatcttgcaactttaacagcacttccgaagaacttcggttataacatgtctatcatgttcctggtattcgtagttctcggtggaattggaaatatgcgtggttctattattgcggcagtgattctgaaccttcttcctgagcttctgcgtggactcagtgattaccgtatgctgttctatgcaatcgtgctgatcgtaatgatgctgatcaactgggcacctaaggcaatcgagatgagagagcgtcttttcagtaaatttaagaaaaaggaggcataagctatggcattgctggaagtaaatcatttaaatatttcattcggcggtcttcatgcagtggatgatttccatgtctccatcgagaaaggacagctttatggtctgatcggtccgaatggtgccggtaagactacaatctttaaccttcttacaggtgtgtataagccggacgagggaatcatcaatctggacggacaggatatcaccggaaagagtaccattgatatcaacaaggcgggaatcgccagaacattccagaatatccgtctgttccatcagatgagtgtgctggacaatgtaaaggcaggacttcacaatcatgataaatacagcctttttacaggtattgtacatactccgaaatactttaaggttgagaaaaccatgaatgaggaagcaatgaagcttcttaaagtgtttgatctggacaaagaggcagatatccttgcatccaaccttccttatggtaaacagagaaagctggagattgccagagcactggcaacaaagccgaagcttcttcttctggatgagccggctgcaggtatgaaccccaatgaaactgaggaactgatggataccattcgttttgttcgtgataactttgatatgaccattcttctgatcgagcatgatatgaagctggtttcaggtatctgtgaggagctgactgtactgaacttcggtcatgttctgagacagggcaagacttcagatgtgctccatgatccggaagttatcaaggcatatcttggagaataggaggagagacagatggcattactggaagtacaggacatacaggtttattatggaatgattcaggcattgaagggtgtttctttctctgtaaatgaaggtgaagttattgctctgatcggtgcaaacggtgcaggtaaaacaactactctgcatacagtgacagggcttctccgggcaaaatcaggacatattatttatgacggacaggatatcacaaaggttccgcctcacaagattgtaacaatgggtatggcacatgttccggaaggaagacgtgtgtttgcaaatatgactgttcttcagaatctgaagatgggtgcttttacaagatctgataaaaatgagattgatgcgaccattgagaaagtatataaacgttttccgcgtctgaaggaacgtcagaatcagactgcaggtaccttaagtggtggtgagcagcagatgctcgccatgggacgtgcgctgatgagccagccgaagatcattctgatggacgagccgtccatgggcctttcaccgatctttgtaaatgagatctttgatatcattaaagaggtaagtgagagtggaacaacggttcttctggttgagcagaatgcgaagaaggctctttctattgctgacagagcttatgtccttgagaccggaaggattacactggaaggtaaggcaagtgatcttcttcatgatgaatctgttcagaaggcttatcttggagaataaacaggaggggttttatggagaattttgtaattaccattgcgagacagtatggaagcggtggacgtaccgtcggtaagatgctggcagagaaactgggagtttctttctatgacaagcagatcattcagatggcttctgatgagagcgggattgatgtgaagctttttggacaggtggaagaaggctccagtgtgaaggcatctctgtttaataagacagggttatataaaggagatctgatcgcaccggatcagaaggggtttgtttctgatgagaatatttttaattatcaggcgaagattgcaacggatctggcagagaaggaatcctgtgtgatcgttgggcgatgtgtgaattatgtgtttaaggacagaccgaatactttgagagtgtttgttcatgcaccctgggagtttcgtgtggagaagtccagagagaagatcagcggcagtgatgaggagattgagaagtttcttcgcagggatgataagagaaagcaggattattatcgtaaatttgccggtggggactggagtgatgcgacgaattatgatctgtgtctgaatgcaggaaagcttggatttgagaagtgtgtggatgcgattttggcgcagatgaacgttatgggaattaaatgatgaaaagggcagtctctctttggaggctgcccttttttggattaagactgggatttgattttgttctggtattcttttagggttttttcgtagcccatttctgagagttcgtagaagtgttctccctggatttcggtagggaggtattgttggtgtacgtagtggtttgggtagtcgtgggcgtatttgtagccgatgccgtggcccagtttttcgtggccgccgtagtgggcgtcctggaggtgtggcgggactgtggtttttgtgcgtttgacggagtccatggcagcgaagatggcgttgactgcggagttgcttttgggggcgcaggccatgtaggtgactgcctgggagaggatgatctgggactcgggcattcctacgcgttctactgcctgggctgcggcgactgctacgcagagggcctgtggatcggcgtttccgatgtcttcggaggcgaggatcatgattcttcgggctatgaatttgacgtcttctccggcgtagagcatttttgcaaggtagtagactgctgcgtcagggtctgagccacgcatgcttttgatgaaggcggagatgatgtcgtagtggttgtctccgtttttgtcgtagcggacgacgcgtttctggatgcactgagatgccacatccagggtgatgtggatgagaccgtcttcgctacggggggtagtgaggatgcccagttcgatggcattgagggcatttctggcgtcgccgcctgccatgtctgcaaggaagtcgagggcgtcttcatctatccgggctttatagtttcccattccttttgttttgtcgttgactgcgcgaaggatgagttctttgacttcggagatctccagggatttcagttcgaagatgatggaacgggagattaaagcagcgttgacttcgaagtatggattctctgttgtggcaccgatgaggatgatggttccgtcttctacgaatgggaggagatagtcctgctggcctttgttgaagcggtggatctcgtctatgaagaggattgtttttttgccgtacatacccaggttttgctgggcttcttttacaactgcttccatatcttttttgcctgctacagtggcgttgatctgggtgaattctgcactggtagtgttggcgattacttttgccagggtggtcttgccggttccgggagggccgtagaagatgacggaggtcagtttgtcagctttgatagccctgtataataaggtgttttttccgatgatgtgttgctgccctacaacttcatccagagttgtggggcgtagtctggatgccagaggggattcctggtccagtgtttttgatttggcgtattcaaataaatccatagtttttttctccataaagtatggaagagcactataagagctcttccattatttttccgtatatttcctggtaatgtgtggaccattttttgcagatcgactgtgctgcctcaaggttaggagctgcgatgttcaggtcgatgagggagttgcccttttcgatgagctggcatcttacagaataggttccctgtttggtgatgtaataatcagcaggagtgacgattcgctcctgggctttgaagccggtagatttcaggtattctctgacttcctgtttgatctcaggagagagatctttctggaaaaaggagagagtctttatgccatcttcggtaatccggtaatgggagacattggaacgggtgtccatggtgatcagttctgcttctaccagttctgagattgcctgctggagatggaaatagtttgtatattcccggtccaggataaattccgaaatctgcgaatttgtcagggtattttcggtattctgaagcatgtataatacgattaatttgtaaactgtgaatggtgttgccattttatccctcctttgcatagagtagcagagaatcttttagtgcgaaaacagtcttccctggtagctttgttcttctttcatcctgtgatgcagcatatttaatacctcacgtttacggcttgcccacagtggtgcgatcagcagatctttggggccgtcgcctgtgatgcggtgtataaccatatccggtctgagatgttccagacagtttataaggagagagatgtattcatcccgttcgtaagtctgaaacagtcctttctcgtaatctgctgccagatcagtgccgcgaagcacatgaagtaactgcagtttgattccctgaatatccatatggttgaggtattccatagtttccagaatatctgctgtgttttcaccgggcaatccgaggattgtatgcacgattacttcgatattttcttttcgcaggcgttttacggcatcatcaaaaacgcagataggatatccccttcggatatacttggcagtggactcatggatcgtctgaagtccaagttcaatccagacaggtttctgtttatttaaccgggacaaaagtgtcacgatctcaggactgaggcagtctggtctggtgccgatggaaagagcaactatctttggatgagagattgcttctgtaaaaattttctccagatattccacaggtgcgtaggtatttgtgtacgcctggaaataggcaatatatttatgaatcggacgtttctgtgaaaggatactgatctggctttctatctggtcagtgatggaaagtgcggcatctgcagcgaaatctccgcttcctcctgcgctgcagaagatgcagccgcgggttccaatcttaccgtccctgttgggacaggacatgccgccatttagcgtgaccttataaaccttttctccaaaccgctctctcagcatatagtccagagagtggtatggtttctctccccatttggtcatactgtgtgatcattttctgctgatgaagtttcagcagagtttccgttctgaaggtctgtatcctgggtatctgcatctgccggaatataattatcaaaaatctttaccagaaaatgtccgttgataaatgcctccagtgcaaatccaaacatgcacagaagcatgatggccatggactgtatgcggaaacttttaataaaaaacacgcctgcaggtaacagagtgatgactgccatcaggactgtatacggaagatgacggatagccatcaggaatgcattgcggaaggtgtttttgatggagttgtagaatttggcaagcaccggataaatatacagaaataccatcatataaaggataccaaatgcaaagaaaacgatatacagtacctgagacattgttccgtcgatattgcctacaatacgcagatccatgtaaaggatagctgcaactgcaagcatgataagattgatgacagttgcctgtttgaagttctgcttaaaggatttgaagaagcttctgataatataagattcttcgttacgtgccattttcagtgtgacatagtggagtgcagtcagtgacgcaccaatagtcacgattggcagacaacagatcagaaagaccacattaagcataataagatcagccacgcgtcccatgacggtgaagaatttgttgtccatgttaaatagtctgtccattcgtttaattactccttttgtatataatgatgtacagcatactctgcggataatcctgctacagagaaatctgtacaagctttgtataacagtataacgaatcaggcaggaaaaagcaaatcttttatgtgagcaggagctggtctgcagtgacaaaaacatagcctttttcagtaaaaagatcagcgattttcagggctgcatccacagatgtctgatagccgtcatgcatcaggatgatagaaccgtcatgaacctgtgtctgggcgatagacaggatagaatcgatgtttttgcttttccagtccagggtatctacatcccagaatacgggaagcatggtgacagaaagttccatatccttgatccatgcgccgaaaggcggtcgtacataagaagggtaaattccggaagcttcatagattctgttatttgttttttcaatttccagtcgggccttctccgccgggatcttgtcaagttgtacatgatcccaggtgtgatttccgataagatgtccgtcttttcgcatttgcaggagtatgtcttcgtttccttcaatgttctcgcctatcagaaagaaagatgcccggatatttcttttttttaatccatccagaagtatgggggtataccgggcattgggaccgtcatcaaaggtcaatgcgattctgggagattcttcaacgggaatcccggcaatggtgtcagttgaaaaatcctcaaaagctgtagcttttgcagatgcctgttttacaagggaaagcataccgggacctgccagtgaaataaggaactgtgtgcgtttgtcagcagaagaaaagagtaggaaaaaaatcatgcataatatttcaaaaaatattaaagtccgcttcatgcaaagatactcctcataaaaatatctttctgattccggaacacagagtatgaatatctgtgtcagaacgaaagaaacagcaggtggcagatgtaatcattacagtatatgaaaaaaagaaagcaattcataccgatttattgtataatagattctgcaaaatatagaagaaagaatttacggagattgagatgaaaaagaaacggacaaaactgctggttttctttgcactggcaggaattttagtgcttttttatatgataggagagtcttattgtgagggactgtccgggggaagtagtctggaagagaagaatgatgtggtgtgtagatataaatacgatatgatcgtagacagtccgaattcttctttctggcaggctgtttatgactgtgcgcaggaatatgcacagaagagcgatggaatcctggaactgagaggtagcggtaaagagagtgattacagcaagctagattatatgaatatgagtattgcttcaaattcagatgggattatcctgcaatacagtggggagcagggactggaagcgaagataaatgaggctgttcagaaaggaattccggttgtcactgtaatgggagatgcagttcacagcaagcgtcagagtttcgtgggtgtcagtgattatcagcttggaagtgcctatggcgaaaaggtagcggaatatgtgactgaggatacggaaagtattcttattctgttgaagaaaaatattgatgatatgaaccagagccagatatatacacagatcagcaatgcagcccaggcaaaggcaggctctttgcaaaatatccagataaccggaaaaaatcttcgcttaaccggaacttttgagacagaagaagcggtaacagatatttttcagcagagagataaagtgccggatattcttgtgtgtatggatgaagagactacagaatgtgcacgtcaggcagtgctggactttaatcttgcaggaaaggttacaatcataggatattacagttccgaagatattcttacagcagtggaaaagggagtaatctctgttacctgtgatgtggatacagagcagcttggcagatacagtatagaagctctgacagcatatcagaaggatggaaggaccaattcctattataatgtagatattaatttcctggacaaaaatgcagtacgggaaatgagaaggaagggggtgttcggatgaagcagctgcgctggaaagatttttcactggtcagtaaaatcgttatagaggtgggtatgatcgcagtccttctttttgccatgaatatgcttttttatgtgcggatcaataattccatgcaaaagatggataatgtttatgccagtaatgcagagcttaccgaactttcacaggtatttgagaaagtacaggataatatgtataagtatcttaaggttaagaattctcagacacttcttgattattatcagaatgaggcaaaatacagaaatgaacttgagaaacttaatgaagataatatcaatgatcccgtaaaacttctggaacggaatatccggaaaatgtcggaaacatatctggactgtactgcggaaacggtagctgccaaacgaggaaggaacgttgagcagtataagcgtaaatatgatgatgcaacaaagctttacagatatatccagtcatctattgacgaactgaataacctgatgtttcaggagaactccagtacttatgcagtacttcgtgcagtgatgagatatctggagataagcaattcagttattatgatcataattgtagccggtggaatgcttctgctcatccaggccaccagaaatatgtttgttcccctttccaatatggcagagacagcacaactggtaggccagggaaatttccatgtaaagatgcacgatacagatgcacaggatgaactgggaacagtaaccagagcgtttaatacaatggtagagaatcttgatctgtatatggcaaggacgaaagcaagtatggagaaagagcagcagatgatggagagggagcttcttatggaaaatcatctgaaagaagcacagctgaaatatcttcagtcacagatcaatccgcactttctgtttaattccctgaatgcaggagcacagcttgcaatgatggaggatgcagagcagaccgggatttttgtagagaaaatggcggatttttttcgctataatgtaaaaaaaggacaggaagacgccacattgggagaagaactggaggctgttgataactatatttatattctgaatgtccggttcgccggagatatccatttcagcaaggaggtggatgaatcactggagaatgtgcgtatgccaagtatgatcttgcagccggttgtggaaaatgcagtcaatcatggaatacgtgacattgaatgggaaggaaaaatacatctcacagttacaggagatgcagattatatacgtatcagcgtgaaagataatggaaagggaatgacgcaggaacagatagagggtgttctgtcaggaaacagagagcgcagaaatgaagaaggtgattctacaggaatcggtatgaataatgtgatcagtcgtctggaactttattatgaggaatcagggcttatggagattaacagtgaaggtgaaggaaaaggcacagaagcagtaatctatatacctgtgcatgaaaactaagagaagtattatgggagtgagagaagatgtatagaattttgctggcagatgatgaaggtatcatgctggaatcattaaagaaaattattgaaactgaatatggaaatgaatgtgagatccactgtgcaaagtcaggcagagttgtggtggagatggcacaggcatattcgccggatatctgttttatggatatccagatgccgggaataagcggaatccaggcaatcagggaaattcagaaatttaacagttcagcagtttttgtgatcataactgcatatgataagtttaattatgcaaaagaagcagtgaacctgggagttcaggaatttctcacaaaacctgtaaataagaaagtaattctggaaacctgcgcgaagatgatgacaaaggtagatcagatacggcagaagagaagcgatgatctcctgatcagagagaaactggagacagtggtacctatgattgagagtggatatatcaataatatccttctgcaggatgattttgttacttatcaggataattatacacagcttcttgatatccgtcagaaatacggttatatgatggtcatagaatttggagattctatggaaaatggggtgctcagtaatgcagtaggtgcaagtgtaaaggcaaacaaattttattctacttttcgtgaaatcgcacagggattctttgaatgccttgtaggtcctattatgggaaacaggatcgtactgcttgttccttatgaaaatgcgaaagaagattacgaagacagagttgcaattgtcacaagagccagaaatatggtacataaatttgaaaaccggatcgacagtatgttccgctgtggaatcggaagagtcaaagaacttggaagcgtgaaggaatcttttaaggaagcggtggtcgcactgagagagagcatcagtcatgtagtgcatatcgaggatgtaccggcggcacagaaatatgacggggaatatccaagagacctagaaatcagatatcagaagaggatccttgagaaggatgctgcgggagcgatgaactgcgcagagggattttttgaatggatgcacagtcagcaggccgtcacaagagaagacattgagattaaaatcctggagatggtgatgaatgcggaacgcagggcattctttgcaggaactttgaaatataatgttaacagcaggagaagctatatccgggagcttcagtcctgtacggatatagaaaatctgaagaagtggtttctggataagacgagagaaatctgtacgaaactggagaattccaaggaaaaagaagctggcagtattattgacagagcaaaggaatatatcaatgaaaatttccgaagggatatttctctggatgatgtttcaagagaggtagatatcagtccgtattatttcagtaaactttttaaacaggaaacaggtaagaactttattgaatatcttacagaaatacgtctgaaaaatgccagagaacttctgcaggattccagactttccattaaggaaatatgtgcacagtcaggatacagtgatcccaattacttcagcaggattttcaagaagtatgaaggagttacgcctagtgagttcagagagaggttaggctgatgaaattatataagacaaaaaagaattgcggaaagctgctgcttggaatactggcattttgtacagggatgatactgctgacaggatgtggttcctcttcagaacaaaaacagaataagaatgaagaaacagcagaagagaataaggaagaggataaggttcagatcggacttacagtggattcttttgttatagaaagatggatccgcgacagagatgtatttgtggcgactgccagagaactgggagcagaggtaaatgtgcaggatgcaggtgcagatgtcaaagagcagatcagtcagattgaatactttataaataagcaggtggatgtgatcgttgtgatcgcaagagactgtggagcactttcagatgccatacagaaggcacagagtgcgggaattccggttatttcctatgacagaatggtcaataatgccaatacagatttgtacatttcctttgataaccgtaaggtgggtgagatcatggcacaggcacttgtcaatgcacttcctcagggaggagatgtctttatgatacagggatcctcttcagataataatgtccagatggtgaaacaggggtttgatgatatgcttgcagacacagatctgcatgtggtttatgaagctaactgtgatggctggacagcagaactggctgccggatatgtggaggaagccctggaaaaatatcctcatgttaagggaattatgtgcggaaatgatgacattgccagtcaggtcgtacaggtactggcagagaatcagcttgccggaaatgtggttgtcgtaggtcaggatggagatcttgcagcctgtcagagaatagtagaaggaacacagtatatgactgcttttaaaccaattgaagatctggcaagaaaagcagcgaaatatgcagtggaaatgggtagtggaaagggagttgcagaactggaagatgtgacagaaacagtaaatgacggaacttatgagattccttcctgcatccttgaaccaactgcagtgacaaaagagaatatagataaggtgattattgaaggaggtttccaccgcagagatgaagtttatctgaatgcggattacagttaaataaaatattcagagattatccggctgcttttgcagaggtaagagtaaatcagtatatagcattatcttgcaacaaaaatgtcctgtcctgtgcagggcattttttgtttttcttaaaatgtcttgtttcttgccaaccatgtccagattgccctgtgctatagtaacgttatcaagaaaacgtgagaaacgtaaaaagaaatggaggatttttacaatgagaaagaaagtcgtatctgcaattctttgtgcatcaatggtagctggaatggtagttatcccgggagtagctgttaaagcggatgacaagaaactgatcggtgttacaatgcctacaaaagatcttcagagatggaatcaggatggcgagaacatgaagaaagagctggaagcagcaggctacgaagtagaccttcagtatgcatctaacgatgtaagcacacaggtttcacagcttgagaaccaggtagccaacggatgtgatcttctggttgttgcatctatcgacggaagcagccttggagagcctctgaaacaggcaaaagaggcaggaattccggttatttcctatgaccgtctgcttatgaattcagacgcagtttcctactatgcaacatttgataactacaaggtaggtcagaaacagggcgaatacttagtagatgctctggatcttgacaatcaggacggaccgtttaatattgaactgttcacaggtgatcctggtgacaataactgtaacttcttcttcggcggagcaatggatgtacttcagaaatacatcgacgaaggtaaactggtagtaaaatcaggacagacagagttcgagcaggttgcaactgctaactgggacagtgcaaaagctcaggacagaatggatacaatcatcgctggtaactactctgacggaacaaaccttgacgcagttctctgctccaacgactccacagcacttggtgtagaaaacgcacttgcagcttcctacacaggagagtatccgatcatcactggtcaggactgtgatacaccaaacgttaagaaccttgtagcaggaaaacaggctatgtccgtattcaaagatacacgtgctcttgcatctgcagtagttaacatggttgacgctatcatgaaaggcgaagaaccggagatcaacgatacagaatcttatgacaacggcacaggcgttatcccgacatacctttgcgatccggttgttgtaactgttgataattacaaagaaatgctgattgattccggatattatacagaggatcagattaaataataagaattaacaaactgtacaggcgggcgcagttcccgcctgtattaatcagtaataagtatttatcttacaagaagaactatcttagagaaatctatcttggaagaaatttccgtttctttccaagacgtacttaaatgctttgttatggaaagggagggaaatagaaattggctaagatacttttggaaatgaagaatatcaccaaaactttcccgggtgtaaaggcactggataacgtaaatcttcaggtagaagaaggcgagatccacgcactggtaggtgagaacggtgccggaaaatctaccctgatgaatgtattaagtggtatttatccgtatggaacctatgaaggcaacatcatttataacggtgaaatctgtaaattcaatacaatcaaagacagtgaagaaaaaggaattgtaatcattcaccaggaacttgcgctgattccctatatgaccatcggcgagaacatgtacctgggtaatgaaagaggtaaatccttctccatcaactggaatgaaacctatggagaagcagacaaatatttgaaaatagtaggactggaggaatcctccagaactttgatcaaggatattggtgtaggtaaacagcagctggtagaaatcgcgaaagcactggcgaaacatgcgaaactcctgatcctggatgagccgacagcatctctgaatgaagatgactctcaggcactgctggatctgctgttgaaatttaaagaacagggaatgacatcgattatcatttcccataaattaaatgaaatctcttatgtagcggataagatcacagttatccgtgacggctctaccattgagactctggataagaaagtagatgacttttcagagcagcgtatcattcagggtatggttggccgtgagatgacagaccgattcccgaaacgcccggatgtaaaagtcggagctgtttccatggaagtgaagaactggactgtttatcatccgttgtactcagaacgtaaagtagtagacaatgtatcatttaagatccataaaggggaagtagtgggtatttccggactgatgggtgcaggacgtacagagcttgccatgagtatcttcggaaagagctatggaaccaagatttccggtcagatctttatgaacggaaaagaagtgaaactgaacactgtacaggaagcaatcgataataaacttgcttatgttacagaggacagaaaaggaaacggactgatcctttccaaatccatcaaaatgaacacatcacttgcaaatatgaaaggcatcagcaatggacaggtgatcgatgcagataaagagtatgcagtagccgaagaatacaggaaaaagctgaaaacaaaatgtccatctgttgagcagaatgtaggtaacttaagtggtggtaaccagcagaaagtccttcttgcgaaatggatgttcgcagaaccggatattctgatcctggatgagcctacccgtggtatcgacgtaggtgcgaagtacgaaatttactgtattatcaacgatctggttgcagcaggcaaatctgttatcatgatctcttctgaacttccggaagtactgggaatgtcagacagaatctatatcatgaatgaaggcaagttcgtaggagaagtcagcaaagaagaggcaacctccgaactgatcatgtcaaagatcgtaaaatcaggaaaaggagcgtaaagaagatggagaaaaagcttagtttttcagaagtattaaagaaatataccatggtgatcgttctggttctggtagtcatcatgtttacagcaaacaccaaaggtgttatgcttctgccgcagaacgtaaataaccttgtagctcagaacgcatatgtatttatccttgcaacaggtatgttgttctgtatcttaaccggtggtaacatcgacctttctgttggttctgttgtatgtttcgttgcagcagtcggcggtaagatgatggttctcaataatatgaatccatatcttacaatgcttgttatgctgatcacaggtattgccatcggtgcatggcagggattctggattgcttatgtacgaatcccaccgtttatcgtaactctggcaggtatgcttgcattccgtggtttatcaaatgtagttcttcagggacagacactggctccaatgcctgattcttatctggcactgtttaacaattatattcctgatccatttggaaaagaaggatttaatgttacatgtttcgcagttggtatcatcgtttgtgttgtttatgtgttactggtactgaaaaaccgtgcagaccgtgcgaaaaagggttacagtgtggaagcttttggcggtgcggcagttaagatggtcctgatctgtgcagttgttctggcctttatgttccgtctggctcagtataaaggtattccgaactctctggtttgggttgctgtgattattgcaatttatacatatatcgcttccaaaactactacaggtcgttatttctatgcagttggtggtaatgagaaggctacgaagctttccggtatcaatactaataaagtttattttctggcttatttgaacatgggtcttctggcagctatcgcaggtatggttaccatggctcgtctgaattctgctaacccgcaggctggtacaaactttgagatggatgcgattggttcctgtttcattggtggtgcttctgcctatggtggaaccggtactgttcccggagttatcattggtgctcttctgatgggtgttctgaacttaggtatgagtattatgggtattgaccagaatattcagaaggttgttaagggtcttgttcttctggcagcggttatctttgatgttgtcagcaagagaaaatcttttatcgtaaaataaaaaattgaattcctccttgaaatggaatctttttgcagggcttgccaagatgcaggctctgttttttttattaagggacgcgcagaaaaatagtttgtttcgtgtgcggtttcggacactaagatattctaggccacaaaaaatctgctaaaagcatgagaaaacagagccaaactcgcctgcggctcagacagtgtctctgttttctcataacgcagattttttctgaccaagaatatctaagtatcctgcaaatgcacgcgaaacaaactatttttctgtgctggttactggctggggaggagaggtgtgtcttatagcaatcctctgaaataataaatgtgcttgagaaatgggtgggggtggaagtataatgtgggggaagattttttacgaaatgaggagagagttgttatgagatataattcagtgttggatctgcatacacatactttggtgagtggacatgcatattgttcacttagggagatggcgaaggcagcttctaagaaaggactggaggttctggggattacggagcatgcgcctgctatgccgggaacctgtcataagtattattttgagaatctgaaaattgtgcccagggagatgtatgggattcagttgcttctggggtccgaggtgaatattctggatgcgcagggaactgtggatctggcgcagcggacgttggagaggatggatgtggtgatcgccagtctgcatatgccatgcatgaagccggggtctaagctggagaatacagaaagctatctgaatgtgatgaagaatccctatgtgaatattatcggacatccggatgacgggagatatgagattgattatgaggcactggttcagggggcgaaagaatatgggaaggttctggaactgaataatcattctatggatccggactgtaaccggcagaatgcggtggagaatgatactgtgatgctgaatctgtgtaagaaatatcatgttccggtggtgatggacagtgatgcccattttgatctgctgataggggagtttgatctggcgagagatttgctggagaaactggattttccggaggaactggtccttaatcggtctgcggatgcaatcagggagtatgtgaatcgtaaattctgataaactgagaagcagttatttggtgtagagctgcgttgcgaaaaagatgattttatctgccttactcttcgaaaaaggcttttgtgagaaaaataaaaaatctgtgatttcttttgggttaaaggcttgcttcctataatttaacgtggtaaaatatcactgttagaaacataacacggacaatttaaaaacaaatgtccacgagtgaagtacagagttctaaaaggagcatgaaaatgagtaaaaaaatcagaacagaggctgtggatcagctttttgaagcgattttatgcctgaaggataaagaagagtgctatactttttttgaggatgtgtgcacaatcaatgaacttctttccttatcacagcgttttgaggttgccaagatgctgatggacaagagaacctatcttgatatttcggagaaaaccggagcttccacagcaacgatcagtcgtgtgaatcgttcactgaattatggaaatgacggatatgagatggtattttcaagaatggcagagaaggaaactaaaggggaataagatagcagaaggctgaataaatgcagtgctattgtggggcaggtgaaaatcacctgccttttttgtatagggagttttcggataaaagattatgaaaaaaaagaaacctaaaatagaattacgctattattacatgcctgtaggaagtccgatccttcctcttctgggagagcgctgggtgcagaattatggaaccggtatagaggaccttcattttcataattttatggagattggtttttgctattatggagagggaatccttactctgggagaggagaaaaggaagtttacagggcgtcagtttactgtgatcccggaacggtttcctcatacaacaaacagcatgggaaatacggtctgtaaatgggagtatctgtttgtggatgttgagggatttttgcgaaagaattgtgagagtgctgtgcaggctgagaaaatgctgcgaaggatcaactccggggcattgttgatgaacgagaaagaggaaccgtttatagctgaatgtattattagaattatggatatcatgcgcatggaagaggagttttatattcaggaggcatccggacttcttatggctctgctggtaaggattgcccggctgaacaggacgccggagcaggaaatgctttatgaagagcagagcaggagtatgcggatcatttcagatacactggattatatttcagatcattacagggagaatataaagatagagcagttgtctgcaaactgtcatctgagtgagtcacatttccgcaggattttttccggatgtatgcatatgagccctgtagagtatataaatctgatacgtgtccgcacagcctgtgaaaaactgaaaaagacagacaggtcagttactgacataggtacggaatgtggatttgcatcggactctgcttttaaccggaatttccggaagctgatgggaatgtcaccggcagagtggagaaaaaagggagaaaattatgagcagctgctcctgaagtttgacatccggacagaggaaggatggtaaatatcagacactggaatatataaaagtcgaaaatggatattatatagtcaaatatgcaaactgtgcgaattggtataatgttataattttgcttatgaaggataactggctgttggcaatatcgtataagatattttatgaaaaaagtcatatataaagtattttgctggaagtattttacaaatgcatggcgaaatgtaatattgcaggcagagagaacagttataaaaaaacaaatcatgaggagaacataagagtatgaaagcatttgattattcactggtaaaagatccacagtatttctgcgataaccgaatggaagctcattcagatcatgtatattatagagatgagaatgaaatgcagactgctgtgcaggatggaacagaaacctcttttcgctgcagtctgaacggtttatggaagtttcactatgcgcgtaattacaaaagcacagttcagggatttgagaaagaggattactgctgttatgactgggaggacattcatgtacctgcacatatccagatggaaggatatgatgcaccgcagtatgctaatgtccagtatccatgggaaggacatgagaaaatttatccgggtcagattccggagagatttaatccggttgcaagctatgtgaaatattttacagtgccggaacatatgaagggaaagagactgtttatttctttccagggagcagagagcggacttgcattgtggctgaacggagcatttattgggtacagtgaggattcttttactccatctgagtttgagttaacagattatcttaaagatggacagaataagctggcagcacaggtatttaaatggacttccagcagctggtgcgaagatcaggacttcttccgtttctccggaatttacagagatgtgtatctttatacagttccggatacccatgcatatgatctccagattcgtgcaatcccggaagagaatctggatgtagcagatcttgaggttaaggtgaagacatggggaaagggaagcattgttttcagacttgagaaagctggagaatgtgtgctggaagagaaaaaatctcttacagaagctggaaatgaagaagccgatgcagaagcattttatattcagaaaacaaattgcagcaagactgtacagaacagctttgcatggaaaattaataatccgaaattatggagcgcagaagatccacagctttatgattttacaattgaactttatgatgaagcaggaactattcaggaggtaattcctcagaaggttggattccgccgtttcgagatgaagaacggtattatgactctgaacggaaaacgtattgtgtttaagggcgtaaaccgccatgagttcagctctgtcagcggaagacatgtttcagaggaagaacttcgcaaggatcttcgcattatgaagcagaataatatcaatgccatccgtacctgtcattatccggatacatcactgatctatcagctctgtgatgaatatggtatttatatgatcgatgagacaaacctggaatcccatggttcctgggatgtggcggaatttacaaaggattatactcatgttgttcctcacaacaaaccggaatggctggatatgatgcttgaccgtgccaactccatgtaccagagagacaagaatcatccggcaatcctgatctggtcctgcggaaatgaatcttttggcggaaaagatatctatgaaatgtctcagcttttccataagaatgaccctacccgtctggtacattatgagggacttttccatgaccgcagttataatgataccagtgatatggaaagtcagatgtatccgtctgtggaagcaatcaaagagttcctggcaaaggatgacagcaaaccgtttatctgctgtgagtacacacatgccatgggaaattcctgcggtgccatgcacaaatatactgacctgacagatacagagcccaaatatcagggtggatttatctgggattacattgaccagtctatttataagaaagaccgctatggaaaagagttccaggcatacggcggcgatttcggagaacgtcctacagactacaatttcagcggtaacggaatcgcatatggcggtgacagagagccatctccaaagatgcaggaagtgaaatttaattatcagaatattacagcagaggtgacagctgatacagtaaaagtaattaacaagaacctctttgtaaatacagatacttttgactgtaaggtaacacttgcaaagaatggaaaagtgatccgtacagaagcattggaaacagcagttgagccattgagcgcgaaagaatataaactgccttttgaaaaggctggggcagccggagaatatacaattactgtttccttccatctgaaagaggaagaggtgtgggcacctgcaggccatgaaattgcgtttggacagtatgtatatcaggtgaaagaggatgttctgaatgaaaaatcagcttcagcagaaacagcagttgtgaaaccgcagatcatccgaagcacacacaatattggtgtccgcggcgagcactttgaagtaatgttctccgtcctcaatggtggtttggtttcctacaaatatgcaggcaaagagatgatcgaggcaatcccgaaaccaaacttctggcgtgcaccaacagataatgactgtggaaatcttatgcagatgcgctacgcacagtggaaaattgccagcatgtatttaagccacaaagaatacagaaaaggtgcatatggtccatccaatttaccaaaggcagaagaaacagaccactctgtaaaagtaacatttacctatctgatgccgactacaccagccagtgagtgtcagctcacctacgaagtattcggtgatggaaaggtgaagacaactttaacttatgatcctgtaaaagaacttggcgatatgccggaatttggtgtgatgtttaagttcaatgcagattatgacaatgtccagtggtatggactgggcgaagctgaaacctatgcagaccgcaaaaaaggtgcaaaactgggcatttaccagaacaaagttgtggataatatagcaagatacatggtaccgcaggaatgcggagcaaaagaggaagtacgctgggcgaaggtcacagaccgcaagggcagaggaatgtactttgagatggatggagaaccaatgatgttctctgcactcccatacactccacatgagatggaaaatgccatgcatccatacgaactcccgcagatccattacacagtagtacgcgtagccaaaggccagatgggaatcggcggcgatgacagctggggagcatatacccatcaggaatatctgttaaatgcagatggaaagatggaattctcctttagctttaaaggaatttaatatagtttatttgtttaaaaaggggctgtcagaataggcagtccctttaactgttatagataaatagacaacaaaaaatgatatttataacgtcgaaaatgtgatatgatatacaagtaaattctttgatttataatgcgggacgaaaacgtgggtattatagtggttcaacgattctcaaaagtcggtgattgacaatgaaaaggagtaacattaaatgatagatatatatacaaataagattaattcaaaagactggatacttcaaaacgacctgtactttaatctgaacacaggtaatgaagaaatgtcacaaaaagaaattgatttaatctggcaaatagatgaggcaaagctgactccggacaagcatatagaaacaaaatatggattgggtacaatacgtaatttatcatcaggctgcaagacactgataaatattgtaaaacaccctgataaggtggtaaatgtcgaggaatgtggtccgaatgtgttaaagatcatttttgctatggaaaatataaagatttatatgtcaagaccgacactttttgatatcccggacaatgcaaaaatccgatttaataattctgatatagttatcggcgggagaggctataatgcctggtggagtaaggagtatgaaaggagagaagcagatgatttataagaacattacttttaaagcagatccattttcatacgatttggaatttgaggatagaattactcttgttggcggagacagcggcaccggtaaaacagtgctttatgaaatgctggaagatataagactaacagacgaatacaaggctataaaattatttaactataaatcagatgattttttaaaagcaataaaacagtgccgggatagtttcattgtggtagataatgcagattacttgattaatgatgatatcaggagattcattaattttgagttctcaaatcagtatatgctttttctgcgaaattgtgacggactcaatgtatctgataaaagttttaaggtgctgaagtttgataacaacagaataacgctggaagaggagctgtgatatgagatatttatggacggaggatactggtgcagggcttcacttctggaaattagttaacaagtttttctttgataatgagcttgtagtcgaaagtaaagaaagcaatcagggattactggatgcggtaatagacttggacattaaagatgacgataaatattacgttgcatttgattatgtggttgataatcaggatattcgtaacaagtatcgtatgttgaaatcaataacagataagtcggaaggaaaaattgtaattctggatatgatttgttttgaatatctgattcttgcatttgacaagctaatagcatggacaggcatcggaaagacagataaaatcaaaattcgtgaagaagtcttggcagcagttgagaatcatagaatcaatttatcaaagattgatgacgagaagacattgcagtatatagcaggttttaaaagatattctacagaacgagtgatgaagtcattggcaggcgaatttacacaaaatgaaaagtggtctgttaaagggactcttatgggtgaatgctggtataagaattgctgtgtgtcggagcatccagatagtcttagatgtggtaagcctgagattgaggatggggatgagaagatgaggatgctgatacagtctgcgaaggtgcaaaatgtgatttgcaaagttgcagattagagtaggatttaataaaagtgaagatttgacatactgtacgaaaagggaaaattattttatgtatcaggcagatgaaaaacgttatgaaactatgaaataccaccgctgtggtgccagtgggctgatgctgccggagttatctctgggtttatggcataatttcggggataccggtgtttatgagaatatgaaacagatgtgcttcacagcatttgacaatggaattacacattttgaccttgcaaacaactatggtccacagcccggaagtgcggaggaaaattttgggaaaatcctgagagaggaattttctgcatacagagatgagctgatcgtcagcacaaaggcaggctatgatatgtggccgggaccttatggaaactggggaagtcgtaagtatctgatcaccagtcttgaccagagcctgaaacgccttggcttggattatgtagatatcttctatcatcaccgcatggatccggagacaccgctggaggagaccatggaggctcttgcgcagatcgtcagaagcggaaaggcattgtatgttggaatctccaactatgatggtgagacaatgaaacgcgccgcagatattctggaagaactgcattgtccgtttatcattaatcagaacagatataatatctttaaccgtaccatcgagacaaatggcctgaaacaggctgcagcagagagaaaaaagggaattattgcattcagcccgttatcccagggaatgctcacagacagatacctgaatggaattccaaaggacagccgcgtcaacacagacggacgttttctccatgcagaccagttcagtgaggaacgtcttaacagtatccgcagtctgaatgcaattgcagcagaaagaggggaaagtcttgcgcagatggcactgaaatggattctccgcgacggaatcgtaaccagtgtgcttataggagcatcccgtccgcagcagatccttgagaacctgaaagtgctggacagtgaatccttcagtgaagaggaattaaagaagatagatgaatgttcactggccttatgatatagccgaaagttaaccgaatcaagtaagtcccctgcttcaattgcgaaaagcaataagcagtgggtggggacttgcttgtatcaggaggagtgcaagctccttctgataaactgcggagcagttattcggttatgagcaagtagcgaagcggattgcgaatatccgcttgactggttgtttataaaacaggagagcaaacttatattatggaagattcatatgtcttacaattacaggaaccgaaattcagagaattttatctaagctacagcggttacgcacaatgcgggccgctgcattgctatggcccggcgtcccgtccacattatctgatccattttgtagtgaaaggaaaaggaatgtatcaggtgtccggacaaaaacattatctcactgccggacaggggtttctgatcgagccaggtacacagactttctatcaggcagataaagatgatccctggagttatctttggatcggagtaggcggcaccaatgcaggaaaatatattcgagatatcggattaaacagcgagcagttgatcttccgttcggaaagtggagaagagttaaagaaaattgtgctggatattctgaaacatacagaaagtaccacttcaaatctgtattatctgcagggacgattatatgatttcttttcagttcttacaaaagatgtggtgattgatacttatctgggcaacacaaaagaaaagaaatatggaaaagaaaacgggtatggagaatatatcaaagaggccatggcatttataaaaaatgaatatgcctgtggaatcggagtacaggaactggcagagcatttaaatgttaaccgtagttatctgtacacaattttcatgaatgaacttcatatttcaccaaaggactttctgcagaaataccgtattacaagggcaagggaattgctggtgcttacagaactgtctgtagaatcaattggaaaatcctgtggctatggaaatgcagaacggtttgccagggcattcaagcatgaaacaggactgacaccaactcagtttcgcaggcaggacagaagtaaaaaccgaagaaacctggaagtgtcagaggatggactggaacagctgctcaacagttaacattttgaaggttcagacaaacataatgccataacgcctcaggataactttctctataataatgtatatgaaggattgcgggagcagcacagctgcggagcaatccgtgatatcaagttagggtcaaaaaaccttttgaccctaacatcatgtatattgaatctattatagaaaggggacagttatgagtattatttttcacgaaagttcaaagacattccatttatacaacaataacatcagttatattatgaccgtacttccaaatggacatattggaaatctctattttggaaaaagaatccatgacagagaagatttttcatatcttcttgagatgaagcagcgaccaatgacagcctgtgtttatgagggaaatcgcaaattttcgctggagcatctgaaactggaatatccggtgtatggcagttctgattaccgttatccggcagtggagatccttcaggaaaacggcagcaggatttctgattttacttatgtaagttatacaattgcagatggaaaaccaaaacttcagggacttccggctacgtatactgagaaagacgaagaagcccagaccttatgtgtaaaattgaaagatgaagtaacaggaattgtattagaattgctttatactatttttacacaaggaggaatcatcaccagaagtgccagatttacaaacgagggtacatcatcagtacatctgttaaatgcaatgagcctcagccttgatctgccggataaggattatgtgtggatgcagctttcaggtgcatggtccagagaacgtcatgtgaaagaacgcagattagagcagggaatccagtctgtgggaagcatcagaggaaattcttcccatgaacataatccctttattgtgctccgacgtccgtcagcaacagaaaatgcaggagaagtgatgggattcagcctgatctacagcggaaatcacagaatgcaggcggaggtggatactcatgatacaacccgcatcactgtgggaatcaatccgcagaattttgactggaagctggactgtggtgagagctttcagactccggaagcagtagtagtattttctgataagggtctgaatggaatgagccagaccttccataaattatatcagaagagactggcaagaggttactggagagaccgtcccaggccaatccttaacaataactgggaagctacttattttgattttacagaggaccgtctggtggaaattgctgcaaaggcaaaggaatgtggtgttgaattatttgtgctggatgacggatggttcggtgcacgaagcaacgattatgcaggacttggtgactgggtggcaaacagagagcgtcttccgcagggaatcaagggaatcgcagacaggatcgaagagatgggtatgaaatttggtctgtggtttgagccggagatggtgaataaggattccgacctttaccgtgcacatccagactggatcctgcagacaccccagaggcattcctgtcatggcagaaatcagtatgtgctggacttctccagaaaagaagtggtggactgtatttatgagatgatgtacaaaatcctctcagaagcaaaggtttcctacatcaaatgggatatgaacagaagtattacggaatgttattcagctgcacttcctgcagaccgtcagggagaagtgtttcacagatatattctcggagtttatgatctgtatgagcggttaaatactgcatttccgcagattctctttgagtcctgcgcaagcggtggcggacgttttgatctgggaatcctttattatgcgccacagggatggaccagtgatgatacagatgcggcagagcgtgtgaaaatccagtacggcacaagcatgtgttatccggtaagctccatgggaagtcatgtttctgtagtaccaaaccatcagttaaaccgcaaaactccgttacatacaagagcaaatgtagcttattttggaactttcggatatgagctggatctgaataaactgtctgatgaggaaatcagtgaagtaaaacagcagattacctttatgaaagaatacagagaactgatccagtttggaactttttacagactgaagagtccttttgagggaaatgaaactgtgtggatgacagtcagcgaggacaaaaagacagcgctggtattttggtacagggaaagaaatgtagtaaactcagattttactagagtacggcttcagggactggatccggatcttatttacagaaatgagtataatggaacagaaaactacggggatgagctgatgaatctgggactgctcaccacagactgtacagcaggtgaacctacaagtgaagacgaaccatgcacagactatgagtccagaatttatgttttaactgcaaaataataaccgaatcaggtaagctccttatggaggttgcgaaaagcaatagacagaaataaaaaatcaacaaaaagcaggcagaacgatcacacgggatcgtcttctacctgcttttcgttaaatttatccatcatttctttatgagtcttataattcttcggactcattccaaacttcttcttaaaagcttttgaaaaaacaagttggtcttcatagcccacattattagcaatctctttaacagacagactggtgctgaccagaagactggctgctttatgcatcttataatcaatgaggaaggtctgtgcggacattccaagctctttctgaaaggaattgttcagataggcacggctgattccgatattatctgcaatattagaaatcccgattcccttttgatacatatctttaatatattcaatggcaagctccacgtagacactggtgctgtaggcatatttggtattttttttgttctgtgcagactgcttttcatgaaagccggcaagctcggctaacaacagaatcagataagcctggcgccttagatcattggctttggaaagctgcttatgattcagcatataatcgatgtgtttcaggattattttctgatccggtgcaggaagtactaattgatttttggaaaatccacattcttttaccattgagtgagctcggattccgcgaaaaccaatccaggcataagtccagggattggtttcatcagcaccgtatgtgactggttcatttggataaattacaaacatctgtccgggagtaaggctccaggtctgacctccggcagaatagaatccggtaccgtccagcacaaaatggatgatgaactcatctcttggcatggaacagatatgtccgggcgggcagtgttctttgcccgtatggatcagactgatatcaagggagccttctttcaggttttcaagacagcggaaagtagcgctgtccgtatattttacatttggcatttgcgcaattcctttttctattttctttgactgcgggtattaattgatataaagacatatggaatgatatcctgtaaatacgcataaattcaagtcgctgttgacattttaccataaattcagcgattttcccataacgattatgacataaatttatttcattagtctattgaaaaaaatagacaaaaatgtataataagaatcactttgatcacaaacgcattttattttgcggttaaacatataggttatgccttagctgtggcagtgattacaatcctgccaatgacaatgacacttgtagatgcaaaacttttcccggtatatctgctgatctggctgatgtttggattctccctgactgcttatgcagattcctggtttatgtggaaactgttcaagccctacttcaaagaggaggaagagggacatcactacgtggacacagaacctgatcagtacgcgttttaaccgaaacaggcagcgaaacggatgattttattcgcttgacccgaaacaagcagcgatacctggttacataaaaaatagatagaacatctataaaatagaaagaacaaagaaatgagaggtacagagtatggaatggatcaaatatcacgaggcagagaaagtattcgacctgagaacagagcacagcacttatcagatgcaggtaagagagtatgatactctggttcatctgtattatggaagtccggtaggcgatgcactgatcacagacaggatcgtatgtgtggacagaggattttcaggaaatccttatgaagcagaaaaggacaaaacattttcattagataccctgccacaggaatatactgcatatggaaatggtgattatcgtatcaatggcctggagacagagcaggcagacggcagtgatactgcaaatctgaaatttgagtcctatgagatcacaaaaggaaagtacagcctgaaagggcttcctgcaatgtttgcaaaggaagatgaggcagagacactggaaattgttctgacagaccgtgccagcggactgaaagcacatcttctctatggtgtatttcctcatcttgatgtgatcaccagagcggtacgcctggaaaatacaggtacagcaccggttacagtaaaaaaagcaatgtctatggaaatggattatgaatacagagaactggatgcagtccatttctatggcagacacaatatggaacgccagatggagagaactcaccttggtcatggcaactggtctgtgggaagtatccgcggaacctccagccaccatcacaatccatttgtgatcctctgtgacagaaatacagaggaaacttatggaaactgctatggatatgcacttgcatacagtggaaacttcttatttgaaatagaggtggaccaggtaggacatacccgtgtagcaatgggaatccatccctatcatttctcctggacactggaacagggagagagctttgagacaccggaagtgatcatggcatactcagcagaaggtttcggaaaactttccagaatctatcatgatgcatacagaagtaatctgatccgcagcaaatatacagagcagccaagaccaatcctggtaaataactgggaagcaacttattttgattttgatgcagataagatttaccacattgcagaagaggcaaaaaatatcggactggatatgtttgttctggatgacggatggtttggaaagagagacaatgattggtgtgcacttggtgactgggaagtaaatgaagaaaagattaaaggcgggcttcctgcacttgcagagaagatccatggacttggactgaaattcggtctgtgggtagagccggagatgatctctgaggacagtgatctctacagagagcatccggactgggcactgaagatcccgggacgtgccatgaaccgaagcagacatcagttaaatctggatattaccagaaaagaagtacgtgaacatattatgaaccagatctttaaggttctggatgcatgcaaggctgattatgtgaaatgggatatgaaccgaagcgtagataacgtattctcagcagctcttccaaaggaacgtcagggagaggtttaccacagatatgtgctggctgtttatgaaatgatggaaagcctggtacagagatatccggatcttttgtttgagtcctgctcaggcggaggcggaagatttgaggcgggaatgctttactattctccgcagatctggtgcagtgacaatacagatgctattgacagactgaaaatccagtatggtacatccttcggatatcccataagtgcaatgggcgcacatgtcagcgtatgcccgaaccatcagtccggaagaacgactccttttgagacaagaggaattgttgcatccgcaggtacctttggctatgagctggatctgatgaagatgtccgaagaagagaaaaagacagccagagaacagattctgaagtataaagaaatggaacatctggtacagtcaggagattactatcgtctggtaaatccattcgaaaacaacaaccatgtactctggcagttcgtatcaaaagataagaaagaaacggttgtatgcggagtaagactccacagtgaagcaaatccttatatttatcttttctacccacagggattggatgctgatatgaaatacgaagacacagcaacaggaaaagtatatacaggtgcagcacttatgaaagcaggtctgcctctgccactgacaacaggtgactaccagccaatcagatttacatttaaggcagtggaaaaataatacagttattatcggtatcaacacagtcgataaggaagcggctctgacggcagagggaaaaatagcataatcattatttctatgacatataaaagcagcagatttccaaaatcaggaaaaatctgctgctttttgaaatattattttttctttttggaattatgctccgattccggattcatcccgtcgattatatgctcgatcatcatcttttttacataaacatcaaagcttaacagacagataaaggaaaatcttttcagattcgcctgatcttctttatctgcgtccccgaaagtatcctgtgctgttttgtatttgcgcagaaggtcttttttcagggattcaatctgttccttttccatgctgaaaacttcattataaatataagtcatatctttctcagtcatggatttaaaatatttctgcgcaatcggtgtgagcagagtctggatatcattgatggaaagaatattcttgaaatagtaaataaaaatcagcatcagtacatgttctttggaataacgtttcttctcaggcgggggaagaagtttattctttgcataattgttgatcatagtcttggtgagaatcttatcatctgcgtaacgtttggaagaaacgagctgctcttccataaaggttgtcacctggtccatatataaatcaatatttgggatgtcttccggtttaatatagtcaatcctggatacactttccagaatgctgtttatcatatctttatcatcgattgtcatctttcatcacctctgttccttattatatagttttaaatactacttgtaaatgtttttttcactaattacaaaatttatatccgcttgaatttacaggaatcagttgtaggcgaacagatttttgtgtataatcataaagatatatgcctgttcaggcacaaaaatatttcgagagatgtaaacggtaaccggtacatattttgaatctgaaagattgttgcaggaatcaacttgttgatcagcatggttgtttgtaaaataatgtaccgtacaggaagaagacaggagaaaatatgagcgatatttatagtacattaaatcctcagcagcaggaagcggtttaccatacagaaggtccactgctaatccttgcgggagcgggttcgggaaagacaagagtacttacccaccgcattgcttacctgatagataaaaagggaatcaatccctggaacattctggctatcacatttacaaataaagcagccagtgagatgagagaacgtgtagataaaatagtgggatttggttccgagagcgtatgggtttccacattccattctacctgtgtgcgtattctgcgtcgttatattgaccgtcttggatatgataccagatttgctatttatgacacagaagatcagaaaactctgatgaaagaagtgtgcagaaaactgaatattgacaccaagaaaacaaaggaacgttctcttctggcacagatttcccatgcaaaagatgaactgatcacaccggatgagatggaactgaatgcaggtggggactttgttaaaaagaaggttgctgaggtatatcgggaatatcaggctgctttgcgcagaaataatgcgctggattttgatgatctgatcgtaaagactgtagagctttttcagaactgcggagatgttctggaaaactatcaagaacgtttcagatatatcatggtggatgagtatcaggataccaatactgcacagtttaaatttataagcctgttggcctctaaatatgaaaacctctgtgtagtcggtgatgatgaccagtctatctataaattccgtggtgcaaatattggaaatattcttggatttgagcatgtttttccagatgcaaaagttatccgtctggaacagaattaccgttccacaaagaatattctgaatgcagccaatgcggtgattgcaaataatacctcacgtaaatcaaaaacactctggactgagaattcggagggggaacgaatccatttccgccagttcatgaacggatatgaggaagcagagtatgtggtaggcgagatttccagagctcacagagagaatggtgcgaagtataaagactgtgcagttctgtacaggaccaatgcacagtcacgactctttgaagagaagtgtcttcttgcaaatatcccttacaagattgtaggcggtgtgaatttctatgcgcgtaaagaaatcaaagacctgttatgttatctgaagacaattgacaattccagagatgatctggcagtccgccgtatcatcaatgtaccgaagcgtggaatcggagctacaactcttggcagaatacaggattatgcggataaaatgagtgtgagtttctatgatgccttgcgtgtggcagaggaggtcccgtctattggaagaagcctttcaaagattgatggatttgtaacctttattcagagtttaaagagtaaggcagagtcttatacagtacgtgaacttctggaagaagtgattgaacttaccggatatgtggcagagctgcaggctgaagacacagatgaatcgaaggcaagaatcgagaatattgatgaacttatttccaagacagaatcctatcaggaagcaatggaagaacagggacagactgccacactttcaggttttctcgaggagattgcactgatcgcagacattgacagcgtggatccggatcaggattatgtgcttcttatgacactacatagtgccaaaggtctggagtttccgagagtatttctcgcaggaatggaagatgggatgtttccgtcttatatgtccattatatcagatgacagatctgatctggaagaagagagaaggctctgttatgtgggtatcacaagagctatggagaatctgacgctgacaagtgccagacagcggatgctccggggagaagtacagtataataaagtatccagatttgtacgtgaaattccgcgggagcttgtggatctgggacaggaagctcaggaaaagaagaaaaagattgaagagatgattcaggcagacagaaaccttgcaaaaatgaaaatggcttttgagacgaaaacattcaagcccagagaatttaaagtgacgaaggctgctacactggattacgaagtgggagacactgtccgacacattaaatttggtgtaggaattgtcaaagatattgtagacggcggaagagattatgaagtcactgttgattttgacaaagtgggaataaagaaaatgttcgcaggatttgcaaagctgaaaaaaatatagtaatggggcaggtgacttaagtcacctgcggaggctgcgaaaagcaataagcagtaaggcgaacgattttatccgctttatatatgagacaggagttcaggaagtttcataagactgtcaaattcatgatcagggatgatttctgaagtcttctcatggctgggattaaaccagatcgtgcggattccggcattgatgccgccctggatatcagaggtcaggctgtccccgatgattactgctgtttccttatggaaattagggattctggagaagcagcagttaaagtattccctgcccggtttattgtatcccagttcttcggagataaaaatatcctcaaagtaacgggaaattccggaacttttaagccgtcccttctggacacttaaggtaccgtttgtaaccagatacatccggtattgaccgtaaagagtttcgagcaattcttctgcaccatctatgaaatagtgtccctgggccagaagagtttcataggtatgtgcagcttcttttgcaggtatatccacattcagctctgcaaaaagaagccggaatctccgaagctttacctggtctctggtgatcttgccctgttcaagaagcttccactgggcgaggttgagctcactgtaacgcttcagaactgaaggctcgggagcaatgtgaaaacttttcagagtttttgcgatagctgctctttctgcccggttaaaatcaagtaatgtattatcaagatcaaaaaaaagtgtttctaccataagtatttatcctctcttatcagatcgttgctgtcggcatatttttaagtcaggggcaaaattcattccagattgcctgcggcaatggaattttggcttgtatgtctcgggattgtgtgaacagtaaccccctgatatcattataataaagaaactaacaaaagtatagaataaatgcagatatcttatggtaaaattacagaaaaagtgttataataatttcattaaacagcagacggcagaagtgttaagtgtcagctgatgaattattgagaggatggtgcgattatgaatatcaaaattgaagaattattatcagcattaaacagaaaagaagaagagaaagaaaaaaatacagtcctctgggtactggcaatcattggcgcagttgcagcagtagcaggtatcgcatttgctgtatatcatttctttgctccggattatctggaagattttgaagaggattttgacgatgacttcgacgattatttcgaagatgaagaagaataattacctgtaatatgaaaatgaaagaatagctccggcttataccggggctatttttatggaggttatatgaaaaaaggcgaaatttatgaaggcgtgattgagaaagtagattttcccaataagggaattgtgataacagacggacaaaaagttaccgtaaagaacggaatgcccggacagaaagttcgttttatgatcaataagaagcgttccggacgtgcagagggaagacttctggaagtgttggagaagtctccgcttgaaacaagagaaccagtctgtagtatttttccggaatgtggaggatgtatgtatcagaccatgtcctatgaaaaccagctcaaaatgaaagaatgtcaggttcgtgaactgttggatggtgcattgaacggcactgattaccagtgggagggaattcatggaagtcccattgaattcagatatcgaaataaaatggaattctcctttggtgatgcatataaggatggtccgttgacgctgggtctgcacaaaaaaggcagtacctatgatgttcttacagcagatgactgtcaactggttcatgaagatatgacgaaaatcctgacttgtgtgcatgaatacttcctgaaacgaaacgtttcctattataaaaagatgcagcatacaggatatctgcgccatctgcttctccgccgcggtgtgactacaggagagattctggtccatgtgattactaccagtcaggaagaacatgatctggaatctctgaaagaagaacttcttgcacttccgctggagggtaaaattgtgggaatcatgcatattatcaatgattctctttctgatgtggtgcagagtgatgagacacgtatcctttacggtcaggatttcttttatgaaacgcttctgggactgcgatttaagatcagtacattttcatttttccagcctaattccctggctgcggaagtgctttattctatcgtacgtgagtatatcggagatacgaaggataaagtagtgttcgacctttacagcggaaccggaacgatcgcccagcttgcagcctccgtagcggacgaagtgataggtgtggaaattgtggaagaggcagtagaagctgcaaagcagaatgcagcactgaataacctgagtaattgtaaatttattgcaggggatgtccttaaagtcctggatgatctgacggagaaaccggatgtgatcattctggatccgccaagggatggaatccatcccaaagcattgccgaagattctttcttatggggtagaccatattgtatatatttcctgcaaagcgaccagcctggcaagagatcttccggcatttctggcggcagggtataagctggaaaaagcctgctgcgttgatcaattttgtcagactgttcatgttgagactgtggtgttgctacaaaggaagaatatgtagaaatccttgaatttacgcactttgcagagttttttagcttcaacaggattgctgaaaatcacaaggaaaaagagcttgtgaggaaggtgactgttgttgtagcgttagacctcggttgtgggaatacaaagaattctgaatatgaaagtaaatagagaactatcagatatattgatagaacgtagggatacttgaaagagtgtccctattttttatattagggcattccattaggagtgcctttttcaattcaatttaaaaggaggttcactatgaacaacacagcgttaggagcagaaaacaaaaaggaacagacaatcaattttatcagcgaagcacatgaaaaattctactatgaaaaattaaaagaggtacgctatcaggatgtgtaccacaaggcactttgctattgccttggtatcagcgatgatacaagaagaaatgttgatagcatctatgattttaagacgggatgtgtaaaaactgagtgtctgcatgaaggctggcagaccagtggcagtatgaaggtggtgcgaatggcatttaacctgtattgcaacggcacaccgagtgtagatgattacgcaaaaacagaggaacaggtaaacgagtgcaggcagtatacagtggaggacttgttttgctgtgcctatgcacctttcttttggccggcgatacagatccgctatccggagtatgcgacttataaccgggaactgtatgccttatttggaggagctgactaatgttaaaagtcagattgatgggaacgaagaatgacattgtgtggtttcagaaaatcttacagcgtcatccaaaagtagaagttctggagatatcagagctttatagcaataaaaggacaaacaaatattatagagcttatgcggaagtacagaaaagcaacgtgaactctccaaactttcataacagggatagatactccatttgcggagggaggaacggcgtttcttcgccgcaccttcctccgctttttctttttgtctgtatccttgtcttttgcctgtccgcaccggataatatgagtagaataagaagcgtagcaaaggagtgaaaacagatgctgacctttgaaaaggtgctggagatttttgcggattatctgaccgcagacgagaccatagaagtttatatcagccgccatggatgtgtaagagttgaatttgatcaagattttcactattgctctggcgaggtgtgccatactcccaaggaactgttcgacctcttagccgatgattaccggacttatctggagattgaactgaccaaaggaaaacgggaagtgacggaagatgatgagagagaagcggatgccctgtgcaaacggcatctggagcgttggaaggaggaacaggaatgaagattttgaaatgtctgctgatgatcgtaactgcaccggtcgttttggtgttgacgctttttgtctggctctgcacggggctgatctacatatccggtctggtgcttggtctactaagcacggtaattgctctgcttggcgtggctgtgctgattacctattccccgcagaatggtgtgattttgctggttatggcatttttgattagcccgatggggctgccgctggctgagatctggctgctgggaaaggtgcagagtttgaaatttgcgatccaggattggatgtatgggtaaatgatgtgaatataatctggaatgaaaagaagcaggacaatgggagatgagacccaatgccctgcttctctgtttattcggaacgaactgtaatatatttttgattgcgacttttaggtttatcgggaatagtcatttctaattgcccggattctaaaagcggattgatatgcttcaaagtgaagtttcttaaatctttgaagccacaaaatactgcaagctctttcttggattttggtgttgtgcaaaaagccaaaatctgtttggacaccgttgatagttcaataacttggtgggtaacttggtggataacttggtgggcgtcaccctctaagttgtagtttacatttttcaagatgactctgaaatctgtcgctgttgaggaaaattcgggcttatatgcctctgtgtatccaggcagcttttcggtttcactgacgattttgcgcaggccacttccacggcgttccatgtacttcatgcggtggaacaaatcagcaatcacagggtttcgtcgcatcgaacgaatactgtaaatatcgtattcctgaattgagccgccgccaaacataccgcccggagatgtgatttccacccgatcatcaaacatatcaatgtggacttcgctgccaagcacaatataatcacgatggatgagagcgttgacaagagcctctgttacagctcgttcagcataatccggcttgtctacccgatactgagcttctttgacaaaacggactttggaattattgcgaataaattcactgccgcttttcagtaaataaatcaaattcccctcgtattccttatcgtccagcgcatcatcaaagatagagcctttttccaagccattccaccgggtacagaacatacgggagttataaactgtgtgctgatcggtcatgagctttccggcattggtcaagaacccatttttgtcagccaaaccgaaggagacataatcggatggctcgaagcggaggccggttcgttccagataggttgcctccaggagtgtgaagctgtaatcctttttcacagcttctgttgttaaggtgtcaaaggactgattggttccctttaagatcagttcattcacaatgtaatccggtgcaattacgctttcatttccaacacggatgtatgcctccatcacgccgtctgccttgtaatagtatggggtgctgcggccaggagaaacctccagagccaacaggtttttaccatcttcctgcaatggctttaagataaactgcggtaatggtgtgatacgttctttgattaagcggctgatcgcttcagcatccttttgaacatcggacaagccgataggctcccggtcatcagagactccgaaaaacagagtgccgccgatcccattggaaaaggcactgacactttttaaccagctttttggcttttttatttcgagagcaactttgaaatcacattctgttgcttcagcaatgagctgttctatcatagaaatccctcctttgaggtattggtagtttctttatattatacccataagaagagtttatttcaacgataggcacaaagagttcagagaaaatattttgagaggagggctttttatggcaactacaagaatcatgccgcttcatgtcggcaaaggccgcacagagagtcgggcgatcaggcaaagccctctcaccgagagctgcttcgtgtggtgattgacaacgcattatcacaaagtcctgctgactttgaagaactgctgaagctgttgcaagagtatggttgtgaagtctcaaagcgcggaaaatcgtatcgactgaagctctctggttgggagaaagccgcccgcatggacagcctgggtgaaggatatggattggaagatttgcgggcagttctcttagggaagaaagcacataccccgcgaaagaaaacagtcacacaggcagagccgccgaaggtcaatctgctggtggacattcaggcaaaattgcaggctggaaaaggtgctggctatgcgcgatgggctaaagtttttaatctgaaacaaatggcgcagaccatgaattacctgtcagagaacaatctgctggagtatgcggttttggaagaaaaggctgcggctgccacggcacatcacaatgatctttcggcgcagatcaaagcggctgaaaagcgcatggcggagattgctgttctgtgtactcacatcgtaaattatgccaagacccgtgaggtctatgtggcataccgtaaggcgggatactctaagaaattccgggaggaacatgaggaagaaattctgctccatcaggctgctaagaatgcctttgatgagatgggcgtcaagaagctgcccaaggtcaaagagttgcagacagagtacgcgaaattgctggaagaaaagaaaaagacctatgccgagtatcggcattcccgtgaggaaatgcgggagcttttaacggcaaaggccaatgtagatcgggtgctgaaaatggaggtagaacaggatgttgaaaaagaaaaagaccacggccagcggtaagctggtcctgatcaaaagtgttcgcaggcactggacatccgggggatgtccgtttagtgccgaccggagtggaacggagaccgcgcagccacagaatgaaattctgtgttcaaaggggcttgggggcgctgccctcaacaagcaagcggagaggaaaatcacggagggattttcttctctgcgggcctgtgtgtattaacacaggcattgcttgcctcttttctccgaaattgaaaagaaccagtgagagaatcgttaaagttcactcactggctcaattcgtttcaaatttttcggacaactctgtcagttctttcaccgtttcctgggtgtgatgcagcagggtgtcacgcatttctggcggacagctggaataaagcattttcatctgattgacaccttcatcttccagagaaatatctggatttataagcgtatctaaagagatgtgcaggacctttgccaatgctcttaaaatcaaataggaaggattcatttttcccttttcgatattggcgatttgctttacagaaacatggctcagatcagatagctcctgttgtgttagctctttattctttcgggcttctcgcatttttagccctaaagcagttaaatcatcaatcggcataatcattcacctcaagtatattctatcgtgccgatttgcacaaaggaataatcttattatgccggttgataggaatgattatactgatttttggtagaacgagagccaaagactatttttaatatttgtttttcaagtataattacagtataataaatgacccatctgaatttagagaggattttcaaaattcgcaataattattaaaacaatcttttttgattttgttattatgcttgatggaaaggagggaacataaatgggcaatcaatcagtcatcagcatagaggcagtcattgactatatcgaaagtcatcttgacggaaagctggaattagaaacggttgcggaggctgttcactattcaaaatatcacttacaccgactatttaccgaaaccgtaggaatgacaattcatgattatgtgcaacgccgccagcttacagaggcggcaaagcttctggtcttttcggataaacctattatcgaaattgcttttatctgcggatacgagagccagcaatcgttttcattagcttttaaggctatgtataaatcgccgcctgcggagtatcgtgaagaacggagcttttatcctttgcagttgcggttcattttacatcgaagaacaacggctatggaatttacaatacaggatattcggttagcagaaaagaaagatattgccgattggatgaacttaatgcggcttgttattgatgggtatcctgtaatggatgaagatgactacttagctaagctggaagaaagtattgacgaaaagcgtgcgcttgtgctaagggagggagatattctcattggagcgatggcatttacctattctccaggcagtatagaatttcttggcgtacatccgcaatatcgaaatcgcggacttcaaaagttattcttggatgccttattggaaacatatcttccagggcaggaaatcagcacaacaacctttcgagaacaggacaaggccgatacagggcatcgagatatgctattgcaacttggttttgccgaaaaagaactgctgacagagtttggctatcccacgcagcgctttgtgctccctcctaaaaaacaggaggatatacaacatggatgacacgcaacgcaccggctggcagaaaagaatactccttttcttaaccagtcaatgtatcacactctttggctctacgcttgttcaaatggcgctcgtttggtatgcaaccatgcaaacatccagcggcgtgtgggtggctgcatttacagtctgttcctatctgccgcaatttctcatttcatttataggcggcgtatgggcagaccgataccacaggaaaaaattgattataggcgcagatctgctgattgcatttgtcactttcgtaatggtattggcaattccgcatatttcatcggagcctgctttgctcggcggtttgcttgttatgtcggtcatacgatccttgggggcaggaatacaaactccagcagtcaatgccgttatcccacagcttgtcccggaagatcagcttatgcggtacaacggcatcaatgcaacaatgcagtctattgttaattttgcggctccagcggcggcaggtgcagtttttgcaatcagcacattgagaatgacgcttatgatagacattgtaacggcgatcttgggaacgggcctattgtcctgtttggcacttccgaaacaaaatacttccattgagaaggccagcgtcttttctgacatgaaaattggcgtcaaatacgcttttgcagacaaactaattggaaagcttttaatcatctacggactattcactttcttttgtgttccagcaggctatcttgcaggacttcttgttcggcgagtattcggtgatacttactggtatcttaccgcagtggaagtagtagggttcgcaggtatgatggcaggcggagttattatgagtacatggggaggttttaagcaccgaggaaaaactttggcagttggactttttgcgtttggctcttttgcaatcggaatgggcttttcaaagaattttattttttaccttggcctaatggtatgttatggagtcgcattaacaatggtgcaaacagcaattaccactatgttacaagaaaaaacggacacctctatgcaggggcgtgtatttggattacttggcacgatgtatgctggctttttaccgattggtatggctatgtttggtcctttggctgatattcttcccttgcagtggattatgattggatcaggtatagcccttattgtaattgcaggtatagcttattatagtcgggaactcaaaacaatctaaaagaaaaaagtcgcccaacgggaataaaaaaaaccgttgtttcggcggctgggtatttatgcgccaaaacaaaatacagtggccttacggcggttttgaaataacatatttcagagccgccgtttctttttcgacgatgctcatgcgatcaggagggcggtatataggaggataccgccatgtcaattttcgtcattcacaatagccatgagttacaccaactaaaaaaagccttgcccctcctccggggaggtatgactacctatcggcattatcattccaactaaaacagaagaatcatagtcatttttgttgcgccagtttcccattgcggggagctggcgttttttgctgtcgattttttgggaaagctcccgaagtatgtcactgtcgatcccctcctcctttcgattcgctcatcaatcgcccgtgaatcgaaatggaggtacataatgaagaaagtcaatcttagggacttatatcccgatgtttacaaaaatgattacttggtagaagtaactgaagatgtgctggagacgatccgagccgctgagcgtgcagaggccgcctatgaccggaggatgtatcgctataaggcgaactactccctggactgcgacaacggcattgaaaatgcgatcctgatgaagccccagacaccggaaatgcttctggaggaaaagcagctgcgggagcagctctatgccgctgtgatggctctgccggagaagcaggccaagcggatctatgcccggtattacctgggtatgcgtgtgagcgagatagcagtagcggagggtgtagactcaagccgtgtcagtgacagcatccggcgtggtctgaagcaactggcaaagtatttttaggatagaattacaaggggggcaaggtctcaaagtgcttctggcacagggccttgcgccctatctacgcacttgtattcttcgaacaaatgaaatataatagagaggattgtcggaggtatgaatatggattatatgacgctcagagaggcaagtgaaaaatggggcatttccacccgtcagataaactattattgcacggaggatcgtattctcggtgctgtaaaaatggccggtgtctggttgattcctaaaactgcggggaaaccacatgacaggagaagaaaagatgaaaaatgaatacaagattttaattatagaagacgatatgttgctcaatgacatgacaaaacgacttcttactcaacatggctactgcgcaacatctgcatattctggaagtgaggcgcttttattgattgagagaagtagttttgatttgattttacttgatctgatgcttcccggaatatcaggagaaatagtattagagaagataaagaatatcatagacatcccgattataggtgtttccgctaaaacagatatagacagcaaagtgaatcttataagaaatggcgctgatgattacatcacaaagccttttgataatcaagaattactggtgcggattgaagcagtgctccggcgatttcagaagtctaccacccccaacaatagcaaaatacttcgctttaaggatttgtcccttgatacagaagctatggaggctaaaatcaggaatacccccattactttgacacggtatgaatacctgattttgcaacttctgatgtcctcgccctcaaaggtattcacaaagaacaatatttttgaaagcgtgtggaatgaaaattttatcggggacgataatgcaatcaatgtccacattggaaatctccgcaagaagtttgccaaggtcaatccagaggaaaagtatattcagacggtttggggtctcggtttcaaaatgcagggttaatccttagagaaatcttatgaagtttacacattagtctgctacaataagacagtatggaaaggggatgattattttggagactgctttggaaacagccgggttgacctatgttttcccggatggaaatggaattaaaaatatcgcgtttcaggtaaaacgcggagaaatctatgcactgtatggcggccatcacgccgggaaatctgtactgttgcaaaccattataggtacacttagatctcaagctggtacgctcaaattatttggcaatatagactatcagaaggagcgccgccggattgggtttgtaccacaaaagcctgtgacaatcggctctctgtcacctgctgatatgctgcgttatttttcttccgtttttggaaccacagaaatccatattttagatatactgcatttgaacctgaaagagaaaaaggcggtacggcgattgccattatctacccagcgtttagtgaatttggctgttgcccttttgggaaatccagatatgataattttggacgatcctttttccgggctagataagggagaatgtgaacacctgctttctgttctgaactatctgcatgaaatcaaccataccacacttttaatctctggacaggattatacgctgctttcccggcttgcatccaaatatggcgtgatggcagatggcaagttgctttgtgagcttacggctggggaattgaaagagagctgccagcggtgcataaagataagaactccacaattagaacgggctattacgattttaagccagcagttcccggattttgaagtgttgggtcatgacctgattagaatttttcattgtaatgagcaatccggggaaatcaatacgctgctggttcattccgggatagaggtatcagaaatctggcttgccggtatggagccgaccgactatcttttgaaaatgacaggaggtgcaaagagtgattcagacgatgcaaagtgagttgttccgtatccgcaaaagccgcctgttttgggtctgcctcgtattggctgcgttttttgtctttgcgcttgccctgaccttttatcacaattcggtaaatggtatgcttccggttatatcactggtttcgttcacggagtttctgttttcagattacagtctgatttttccattgacgctctttttgtgcctatactttacagaagattttcataccggtacatacagtatcacactttctaaagggacaagcagagtacacctattctttggaaaactgctggcctcatggggtggcgttttattttttctgtttgtatgctttgatgttgcgtatttgtcaattctgatgatgggagcatcccggtatgacatagagtattcgttttctgcaatcggagtctttcttttgtttcaatgcctgtgctttttaggttacactgcatttctcaatttgttaagttacctgctccggcatcggatcattgttacgattaccgcattttttatgctgggggttttgtatttatatctcacaaagataagtacagcactggatatggattattccctctacaaatattgggttgtagggctatctcatagcttgcagatcaaagcctttggggaggatttaatacctatttgtttgacactgttagcatatctgtttttaccaacagccatttcgctctccctgtttctaaggttggacttgcgcgatttggaaaggcggtgatggctacatgatggtgttatgtatcttgcttgcaatgctttccctgtttttgtccctgaaactgatttatcagcgaaagttggttcagaaagtaaaaaaacagattgactttctgattgaccgtgatacgcaaaccgaaattatggtggaaaaaacggatgggacaatacaggatttggctgcaagtatcaatcatcttctgaaaaaatatcgtagcatggggcaggaaattgaacggagcgatacactgttccgagataccattaccagtctttcacatgacttgcgaacgccgctggcaacagcaaatggctatatccagctcttacaggaacaggatttaacaggagagcaaaaagaatatgtgacgattgcgggagaaagaatttccgctgtaaagttgcttctcgaccaactgtttgaatttgcaaggattgaggccgacgaactgaaattgaattgcagaaatacggatatacacagtgtgcttcgggatgttgtcgcctcatactacggcgattttgaacagaaaaaatgtgtcccctatatcgttatcccaaatccaccagctatcatttggggcgatccaaatgccttgacccggattttctccaatgtggtttataatgcacttgttcatggggagggaaattatcaaatcaccgcagcgatagaagaagctcaaacggtcataaccattaaaaatgcgtcgagcagtattcagcaagaagatattcctcatttgtttgaccgtttttacaccaccgaccagtcgcgaacaaaaaagacaaccgggctgggattggcaatcgctcaaagacttgtgacccgcatgggcgggcaaattgtcgcttccttgcaaaacggtatctttgcaattcaagtcgtgtttcccattgtcaattcctaaagggctgcttcggcggctcttttttcatccttagactttccttagacttttctcaaacaaatcctaaacctctttggtaaagtatgagccataggaggtataaacaaatggttaaagtagctttagtggtttctatcatcgctttggcggtgtgcctgctcacggccttgcatggcgtattgagcgatggcctaaaaggactaaaacagagatcaaaatccattggtatttcatttttgatttatgctgtggcctttttgcttttcatcttttttcaataatggaggtatttcatgctacaaatcaaaaatgtaaatctgaatgttggaaatacagcattgctgtccaacatcaacttgacattagagcaaggaaaaaactatggtgtgctagggccgaacggagccggtaaaacaacactgtttaagtccatgctgggtctaactgatttttcgggagaaatactttcggacgggcagcccgtttctagtagatgttttggaagtttgattgagtacccggctttttactcacggctcaccgtagaggaaaacttgaatctccacgcacagtacttaggtttgaaacagccaaacattgaagcggcgctgaaacaagtaaatttgctggatgcccggaaaaagctgttttctcaactttctttggggatgcgccaacgcctgggaattgcacgcgcctttttaggcgatgttcaatatttgctgctggacgaacctaccaatggtcttgatccaatggggataaaggaaatccgactgcttctgaaagaacgcttaaaatcaccacaacactgtattttggtatcaagccataatctgacggagattgccgccgtgacagatgtccttattttcattcgtggcgggaaaatcatcaagattgtaaaaaatgactataacgaaaaagaactggaagcactgtatgaggatattatgacttccggccagagggaggaagcataatgggaatgttgattaaaaatgagttttacaaattgaagcgggaatggtttatggcatttcttctgctgctgtcgcttcttcccatccttaccggcggagcaggagcagtattcaacaacagcacaaaatcacttgctgacctgtttttctttatgaataaccagttttccatgttcttcccaatggtgattttcattttaattggttcactgttttatcaggaatacaagaacaaaacctacatcaactggattacctacggtttttcaaaaaagaaactctttctatcaaaagtcgctgttagcaccgttatcagcattggctttgcagtcattttatttgttgcttttggtctgctggtggcaatactcaatggaactggtaggttgaccggaggtgtttcattgttcctcaatttggcaatcgggtttggaattgaagcctgtgttatcgttttgataactacttgtttgggggcaatcgttattaatctgagccgcaatattattgtgacaagtgtagtaggggttatatatggctttgcatcttgcctgttcatcggttcggaaaatggctttgtcattccgggtagttttgcatatcgtgtgtctatgtcctttttggataaagccacttattatgacgcccctgtgccagctactatcggcggatgtatcagttttgtactttgctttgcggtgatgtttttggttgggttgcttgtcttttcccacaagaaaaaaatagaaaattaaatcctgccggacgacggcaaaagaaaaaaagccgtcgtacagcagacacatttccacgcgcctatgaagcggcggctttgagaaaatcagagccgccgtttctttttgcttttcggaccgatgcatatgcaatcaggagggcggtatataggaggataccgccatgtcaattttcgttattcacaatagccatgagctacaccaattaaaaaaatccttgctcctcctccggggagatatgactacctatcggcattatcattccaactaaaacagaagaatcatagtcatttttgctgtgccagtttcccattgcggggagctggcgctttttattgtcgatttttcgggaaagctcccgaagtatgtcgatgccgatctccgcctcctttcgattcactcgtcaatcgcccgtgaatcgaaatggaggtacataatgaagaaagtcaatcttaaggacttatatcccgatgtttacaaaaacgatcactttgtagaagtaaccgaagatgtgctggagacgatccgagctgccgagcgtgcagaagctgcctatgaccggaggatgtatcgctataaagcgcattactccttggactgtgacaatggcattgaaaatgcgattctgacgaagccccagacaccggaaatgcttctggaggaaaagcagctgcgggagaagctttatgccgcagtgatggctctgccggagaagcaggccaagcggatctatgcccgatactatctgggaatgacggtaaatgaaattgccgaagtagaaggtgtagatccaagccgtatccgtgacagtatccggcgtggtctgaagcagctggcaaagtatttttagggtagaataacagagggcgcaaggtctcaaagtgcttctgcataagaccttgcgccctacctattgtagtagccttagaggtgtattttgtaaagctatctttgagtgaagaaacatgatctttatcaagaaaatttgtcggctcatctaatagcaatacatctggtttttcaagcagtagctttgccaaaatcacttttcctctctggcctgtttcaaagcgagcccgagcccatgaaagtcaaaccttctttcatcttggttcattctcatatcaccctatatcattgtacatttcgggttggattatgagaatgtaatatgatttgatattacataatatattatttcataaaattgacaaagaagaatgtttgtgctattctatataaaaatatatctccaaaggggagcaagatatgaactttcatttaacagatcagcgtaaaaagaaaatcagctctgtacaatccattccgatgaaacattgtgcagagtatagcgtataaaaagcgcatttagatttcatcgggaagccaagggagtagtgtacccgttttagggtgttggctttccgtgcaattataatgtgtacgaggctatgggcaatgttttgtccatagccttttgtttttgcgttactatgtcaaaggcagaaggcagataccgttgtgtatctttgctttctgcctttttcttttttcagaatacataagaaagggtttttgaaaatgagtttattagaaattacaggattaacacattcttttggtgaaaacttgctttacaaaaatgcaggattcacactgaataaaggggaacacatcgggattgtgggacaaaacggaaccggcaaaagtaccctgattaaaatttgtacagagcagatcatacctgatagcggacgggttatctggcggccaaatattacgattggctatttggatcagtatgcagaaatcgaccatacgcttaccatgaaagagtttttgaaatcagcctttgcaaagctgtttgaaatagaaacacaagttatgcagctatatgaaaaggccgccgatggagatatgaaaaatctggaacttgctgcctactatcaagagcaacttgaaacacatgacttctattccattgatactgcgatcgagcgcgttgcaaatgggctggggctgcttgcgattggtcttgaccgccctatcattgaaatgagtggcggccagcgagcaaaagtgattttggcaaagctactgcttgaaaaaccagatgtattgctattagatgagccgacaaattttcttgataaagatcatgttgcatggctggcggaatacctatcctctttggaaaatgcttttttagttgtttcccatgattttgactttttggataaaatcgcaaatcgtatctgcgatatagataatgacacaataacaaagtattatggcacttattctgaatttctgcgaaaaaagacactgttgcgggaagattacattcgtcaatactcagcgcaacaaaaggagatcaaaaaaacagaggagtttattaggaaaaatattgctggacgaaaagcaaaaatggcgagagggcgacaaaaacagcttgatcgaatggacaaaatggaggctttggaacagaaagagattattcctcattttcattttcctgttttaccgctgacaaatacggagcatctgctggtcaaacatctggcagttggttatcactatccagttctatcagatattgattttagcataaaaggcgggcaaaaagttgttatcactggctttaatggaattgggaaatctactttgctcaagacattaattggacaaatcccgtccatgcaaggtcatttcaaattttccgatcaagttacctttggatattttgagcaggacttaatatgggacgaacctgaacagacaccaattcaaattgtttccaatatccatcctgatatggtcataaaagatgttcgcaaacatttagcccggtgtggaatttccagtaagcacgcaatgcaagcgattggaacattaagtggaggtgagcaggcgaaagtaaaaatgtgtttgctaacactgattccctgcaattttctaattatggacgaacccacaaatcatctggatgttcaggcaaaggaagcattgaaatcagctcttatggattttgcgggtactgtattgctcgtatcacatgaagaagcattttatcgtgagtgggcacagagagttattagtgtcgagaaatagaaaatagaattaagtatagtatatgtgcctacccccgacggggaaagaaaaaaaccgttgccgggtaggttggttttgtgcgcttattccacatgttctgcggcggttttgagaaatcaagaccgccgcttcattgcgtttaagacacaaaaatgattctatacattgaaatctggtacggcggtaacaggaggatgccgccatgtccattttactttttcgtagttctaatatcctgcaccagctaaaaaaagtatagttcctcctccgggtaagttttgcattgcatcggcattatcgttccgtgtaattaagtacaatcgtggctgttcttggtgcgccagttttccattacggaaatctggcgttttttgttgcttttttttcggagatgatccggttgtctgccggtgtcggtccccgcctccattcgattcacccgtcaatcacccgtgaatcgaaatggaggtacataatgaagaaaattaaccttcgggaactttatcctgatgtttatccaacagacttttttatagatgtgacagaggaagtaatggaaactattcgagcagctgaacgtgcggaggctgcgtatgagcgaaagatgtatcgctacaaggcccagtattctctggattgcgagaatggcattgaaaatgcagtgctgttgaagccgcaaacgccggagatgcttctggaggaaaaacagtttcaggagcaggtctatgccgctgtgatgaagctgccggagaaacaggcaaagcgaatttatgcccgatactatctgggaatgacggtaaatgaaattgccgaagtagaaggtgtagacccaagccgtgtccgagacagtatccgccgtggattaaagcagcttgtaaaatatttttgataaaatttcatttgatgcgcctgttttttgccttttttgtcagtgttaataagaaggacaagttttcctccttcatcagtacattgctacgaaaataaaactcgtagccaaaaactgaaccttgacaacaaatgttttcaacaattatgaaagcatcactataaagcagtcacagtattggctgcctgtagtgagagattgatcgtatttaagaaaggctagctttgagcttccacatgataaccatgtttttccaattcccgtatataacgagaaagctgtttttgttcacagtgcttacgtcttgtttcaaaacaggattcgtcaaatagagttccttgttttaacattgtgtagatgatgacaagaagttttcgggcaagtgcgacaatcgcttttttggctccttttttctgtttgattctccagtaccatgccgaaagataagtgttgcgtttccctgcaatcacccaggcaatttcgcagagcatactttttatgtaaggattgccttttgtgacagaggtgctttttcgttttccagcactttcgttattacctgggcacaaaccggcccatgagcagatgtgttccgcagttttaaacggcttcatatcaataccgatttcagcaataattgcacaggaagcagttgtgcttattccatagatgctattcaactgctcaacctgcagggcaaatggagccatatcttcctcgagactcgtttcaatttcagcaagatgtttctttaaagaatcataatgagtcatgagaatccttaaaaatgccttttggtgttctgacagtgttccgttcacggacatgagaatttcatcaatacggtttctggtcttggttttgagacaagaatctaaagcagttttatcaatctgcccatgttcaactaaatgcagaatgatgtttctacccgaagcgccaaaaatatcagaaataaaggatgatagacggaagccggaactttgtaaaaatttctcaatcctgttcttctgtgacgtaatatcgcggatgacactcttacggtaacgatttagatcgcggaattcccgaatccttttttcgggaataaaacttccgttcaaaagtccggcgcgaagcaaggtggaaatccattcggaatcccgcatatcggtctttttgccaggaacatttttcatatggcgtgcatttacaacaagcagggtaatgtcaccagagaaagcatcctccagtatttcataaatcggcatccaatagataccggtgctttccatagctacatgatggcagtttttagaaacgatccaattccgtaatgctatcatatccggaatcaatgtagaaaactcacggatttcagaacgggttggcttgcccagaggaccagtcaggatacatgcaacaattttttctttgtggacatccagtccacaggaaatttccagaaggtctttcatacagaacaactcctttactatagaattggcaggagatttgcccgagataatacggactttgctactcgtgctattcataaaaggtgcgacaatatgctgtgctcaagggcaaatcatttacgttgacaaacggggtgcaaatcctccaaggtgcaatcaaacttaatcctgcctaagactattgtaaggcaaaaagagaagtgaaaaaagtagtggagtcagtatcctattttcattataggctgagataagctttcatgattcgttgacaactgaatacacggcagaacaggtacataacctgcgcatgagcgagtgcaggacgtcgcgaagatggagcagccaggaggtgatggacaagctgtttcggagcgatcaacgtccctgtgacccggatggtggcacatccggcgcgatgagggcgcgggggcttaaagatacttcctcacggcccgccaaagacttggggggaaccctgcggcacacgatacgaacgatgctgcggagttatgacagccgcgccagcggagacctgttgtgttcccatcgtcagggggcgtggcaaatatgacgagtaatccgaacagaataacagtagccgcaccaggtttttatccgaagatttctttcagactggtgcggctatttaagtattaagatattaaggaggcgagagtgatgtttgaaaaattccatcgaggtgacatatattcggctgatttaagccctggtatcggctctgaacaaagtggctctcgtcctgtactccgcattttggatgcgatcaatcaaaactttcccgatatgcagtacatcacttcttatgcccgcgctgatagtatcactcggaaaaatccggcagagctaaaggcgctccggcaagcgggcctgaaccatctttacagcggaatggaaaccggctcggatcggatactgaaacttatcaacaaaggttttgatgcggataccgttgtacgaagcggctgcatggcaaaagatgcggatatgatcttgtcggagttcatattgctggggatcggcggcaaggagctgtctgaagaaaatgctgctcaaacagcaaaggcgttgaacatcatccagcctgattttatccgtgtccacgccacgggtattaagccagagtccaagctgggcgagtttgtcagggatggctcgtttactctgcaatcggaggaagaaatcgttatagagcaaaagttattcttgcagcagctacatgagatggacagttactatgtgaatgaacacatcgtcaatctgcttctggaggtcaggggaaatctgcgaacagagaaacaggaaatgctctctacgattgaccgctttctgaccctgccaccggatgaaaggcttttgtttactgtcggcaggcggctcaatatcttcttccgcttggatgatctgaaaaagccgaagctgtatcaaaaggccggggaaagcctgcaacagattttaagtaagaatccccatgttgactttgccgcgctgtgcaattacgtccggcagtcacaaatttagagcagaaaatataagctgggcatagccgcttttcgtcagctatgccagcattttatttgcggctttgacagcatggcgtctgcacatccaggccacccagatagctgtttccccactggcacatcgcgtccagaatgggtacgatgctctgtccaaatgaagtaagggaatataccgtcttgggcggcttttctggaatcacttcacgatgaatcattccgttgttttccaaatcgtgaagctgctgcgaaagcatctttggtgtggcgtttggaatcaaccgctgcaactccatatagtgtaatggatggtcgatcagatgccagagaatcaacggcttatacttgccgccgatcaaagaaagggttgcctccacggggcagttaaactgattggtttgacatttcatagaatggttctcctttcccgcatggtgctatctttttgggaagtatcttccgaaaaagtgcattcttgcggttttgttttctggtgctacaattaggtcaatggttgatttgataggttcataataaaaaaacagaaaggatcttgtactatggattttattacgattgcaaagcagcgtatgtcggtacgcaattataagaaaacgaaggtggagcctgagaagctggagaagattctggaggctgctcatgtagcccccaccgctgccaacctccagccggttcacctgattgctgttcagagcgaggaaggtcttgcgaagattggcaaagcggccagcatctacgaagcgcccctggccattatcgtctgcgccgaccacaataaggcatgggtgcggccttttgaccagaagcagaccggcgacattgacgcctctatcctgaccgaccacatgatgctccaggccacggagctgggtcttggaacggtgtgggtatgctacttcgatcccgatgttctgcggcaggaatttgacctcccggccaacctggagccggtcaacatcctggttgtcggctactccaatgagaagcccgctgacaccaaccgctttgataaaaagcgcatcccgatgagacagttggtttcctacgaaactctgtaatggaatacccggcacagcccctgcgaacgtacaggggctgtgttttttatctttctgaaatatgggcgtaggtttcttccagaatccaccggatatgttcatcctgcaaggaatagatcacgtttttcccggccttgcgtgattgcactaaccggacaatccgaagcgcacgaagctggtgggatatggccgattctgtgacctccatcttttgtgccagttcgctgacgcaggaatctttctgcatcagataccaaagtatccgcatccgtgtgtaatcgcccatcgctttgtgaagctcggttaactgttccaattcgccggggcttggaacggaaaaagttgttttctctgtttcgttcatgtatttttctccaatctataatgaagctgtttgacagacaagaattatgtcagtatcatagtcacaggaaggagctgatttttatgccgcattacaatctgccccacaaccacggacagaatattgaaaaagtcttaaataagatgccctctgcggaagggtttaaggatatatcatttttatttcagcagcttggcgatccgacccggctgcggattctatggctgctgtgccattgtgaagaatgtgtatgtaatctcgcggcggctgtggatatgagcgcccctgctgtgtcacatcatctgcggatattaaaaaagagcgggatcatttcaagccgcagggacggaaaagaagtttattattcgctgtcggacacgccgcaggcaaagctcctgcatcatgccatagatgcgttgtttgaaatatcatgcccgactgaacaataaggaaatgcgccgcagcgtgtgaaagttgcggcgcatttctattgcgcttaaccctgatttgtgctgcccgcaggcatatccggcagcttgacccgcatggcgcggatggcattgagaatcgcaataatggaaacgcctacatccgcgaacaccgccgcccacatattcgcatagcccagcgcacctaaaatcagaaccaggaatttaacgcccagagcaaacacaatgttctgatttgcgatgcgaatcgtcttacgggcgatcttcataacagcggcaattttggacggttcatccgtcataagaacaacgtcagcagcttcaatggcagcatcggaacccaatccgcccatagcaataccgacatcggcccgcgccagtacgggagcgtcattgataccgtccccaacaaaggccagcatacctttttcgcttttctgcttcagcaggctttccacacggtcaaccttatcagccgggagtagttcggtataaacctgatccagatgaagctgtccagcgactttctttccaacggcgtctgcgtcgccggtcagcatgaccgttttgcggataccggcagatttcagcagcttgattgcggctggagcatcggccttgatctcgtcctcaatgacgatacatcctgcgtatttcccgtcacaggccagatagaccacggtgccgacagcggaggacggcgtgtacttaatatgctccttctccatcagcttggtgtttcctgccagaatcgttttcccatcaatcacggcctgtacgccgtgaccggcaatttcctgaacatcggaaacccggctgttgtcgattttctctccataggcgttcttgatcgaaagagaaatcgggtggttggagtagtcctcagcgtatgcggccagctccaaaagctgcgcttcctccatgccgacagggtggatctcgctgaccgcaaaggagccttttgtcagtgtgccggtcttatcaaagaccacgacctcggtatttgccagggcctccagatagttgctgccctttaccagaacaccgatcttggatgcgccgccgatgcctccgaagaaactaagcggaatggaaatgaccagcgcacaggggcaggaaatcaccaggaaggtcaaggcccggtaaatccaagtgctgaatggctgctgggtaatcagcggcggcaggatcgccagcgccagagcagcgaataccactaccggggtataatacctggcaaagcgcgtgatgaaattctcaatacggcccttcttatcgcttgcgttttctacaaggtcaaggattttggctacggtggattccccaaattcctttgtggtctggatgttcaggataccggtctggttgatacaaccgctgatgacctccattcccggctccacctcgcggggcatggattctccggtcagggccgaagtgtccaaggtggaaaagcctttgagaatcgtaccgtccagcgggatgcgctctcccggtttcacaacaatggtttctccgatctgaacctcatccggatcaacctgaaccagctttccgtccctttcgatgttggcatagtccgggcgaatgtccatcaggcttgcgatagattttctggacttggacaccgcataggactggaaccattcacccacctgataaaacagcataacggcaacgccctcggaatgttcgcccaaaatgagtgcgccgatggtggcaatcgtcatcaggaaattttcgtcaaacacctgtccatgcaggatgttcgtgattgccttccagacaatatcccaaccgacaaccacatagcagacgagaaagaccgccatctccgccaattcagggaggtggagcaagctgcctgcaagaaacagcaccgccgccacgataatgcgtgtgagcaagtgcctttgttttcgtgtcatagtgtattctcctttcgttgcagcataaagcgtgtcacgctttttctgtctattgatgaaaaacaccggctaccgtgtggcagccggtgtccagcttttcattatgccttaatagtcacatccggctcgatctgcttaatcagcgcctttgcttcggccagaacagcgtcaaactgatcgtccggcgcttccagaatcatcttctgacccaggaagttgacggatacgctggtcacaccgtcgatcttcttcacggcgttctggattttgtcagcacaatggccgcagtccaggtcaagcagtttaatggtctttttcatggagaaagccccctttcattttggtatttggttggtttgatatggatgaacaattaaaaggttgtttaatcgttcatgctgccagtatattcacgaagcccctcaaagtcaatggatttgggagcgattctgccctttggattggaaaacctgctgattggatttccagcaaaaacctcatttctctttggataaaaaaagctccactttggagcggacaaaggagaagcaggataagtataatgaaaaacggtcaaagaccttgtgcgtaaactttatgttcggggctttagcatctttcccccaaggtgccaaacgccccttttcataacggtatttagttccctacgggggaggggtactcgcacaaatcttcataagaaagaagggataattttgcaaaaggagcaatttgacattacgggtatgacttgctcggcctgctccaccagagtggaaaagagcgtggcaaagctacctggcatcaaagaagtatccgtcaacctgttaaaaaacagcatggttgcttcttatgatgaatccgttttggatacgacgggaatcgtccaggccgttgaaaaggccggttatggcgcgattcccaaagcctccgcacaaaacaagagccggacgaccacaccggcagcaaaaccggaggtcagtacggcacaggcagaatacaagcagatgaaacagcggctgctgctttctgccctttttacgatcccgctgttttatatttctatgggtcacatgatggggtggccgctccccagctccttgctggggatggaaaatgcaatcagctttgcatttacccaattcctgctgctgatcccggtggtgtttatcaacttcaaatattaccggatgggattcaagaccctgttccacggctcgcctaacatggattcgctgattgcgataggctccagcgccgcaatcgtttatggcatttacgccgtttacaaaatcggcatcggattcggtcatggggatatggctacggttcacagctttatgatggatttgtattttgaatccgcaggcatgatcctgacccttatcaccttgggcaaaaccctggaggcccgcgcaaagggtaagacttcggacgcaatcacaaagctgatgaatctggctcccaaaacggctatcgtggagcgggacggaaaagagcttcaggtgccggtggaagaagtgcagttgggcgaaaccctgattgtcaaggccggtgaatctgtgccggtagatggtattgtcatagagggcttttcctccgttgatgaatctgccctgaccggcgagagcatccccgtggagaagcatatcggggacaaagtgatcggtgcgaccacaagtaagtccggctatttcaagatgcaggccaccaaggtgggcgatgataccacgctggcacagattgtccggctggtggatgaagcgaccagctccaaggcccctattgcgaaactggctgataaggtcagcggcgtgtttgtgccggtagttatcagcattgcgctgatcgcggttgttgtctggctgctgttgggatatggctttgaatttgccctgtctatcggcatttccgttctggtcatttcctgcccctgtgcgctgggccttgcaacgcctacggccattatggtcggaaccggaaagggcgcaagcaacggtatcctgattaaatcggcggaggccctggaaacggcccatagcattgatacggttgtgctggataagaccggcacaattactcagggcacgcccgtagtgacaaatatgctctgcaaagagggcgttccacaaaaggagctgctgcaaatcgccgcttcgctggaaaaaatgtccgagcatccgctggcggacgcgattgtggcggaggccgaaaaagcagacctttccttccttccggtggacggtttcaagcagattcccggtcagggccttgtggggcagattggaaacgaaacgtgccttgccggaaaccgccgactgatggcagcaaatggcatcaatggcggcgcactccttcagttgggtgagaaaatggccgttgacgggaaaacacctctgttctttgcccgtggtggtcagtttattggtgttattgccgtggcggatgtagtcaagcccaccagcaagcaggccatagcggaattgaccggcatgggcattgaggtggtcatgctgaccggcgacaatgcaaagaccgcagaagcgattcggcgtcaggtcggcgtggatcgtgttgtggcagaggtattcccccaggataaggagaaggagatccgccgtttgcagagcgccgggaagaaagtggcgatggtcggtgacggtatcaacgatgctccggcccttgccagagcggacgttggtatcgctatcggagccggaacggatgtggcgattgagtcagcggatattgttttgatgaaaagcgatctgctggatgtgtctacggcaatccagcttagtaaggcggttatccgcaacatcaagcaaaatctgttttgggcgtttatctacaacatcatcggtatcccggtggcggcaggcgtgttctatctgccctttgcgttgaagctgaaccccatgatcggcgcttttgctatgagctttagttcggtattcgtggtatccaatgccctgcgtctgcggtggttcaaggcgaagcatcaggccaatacagaactggattcagaccctatgtacgaacagacaacagtaaaagaagaacgaaaaggagcaattcacatggaaaaagtattgaacatcgaaggtatggtttgcggaatgtgtgtgaaacacgttgataaggcgctgcgggacatccagggcatcaaggatgtggccgttcacctggagagcaagtcggcccaggtgcagcttgaccaggatgtgccggatgctgtgttgaaagctgctatcgaggacgctggctatcagctcgtcagtatccagtaacgggccgtttatgaaggccaagaaaggcgatattgttcacaagctaaaaatcgccagaggacaaattgacggtatcctgcaaatggttgaggaaaatcgctattgcgtggatatttccaatcagcttcttgctacacaggcgttattaaaaagcgccaatcagcagattttgcaagcccatatacgaagctgcgtccgggaggccctgcaaacggacgccgtaaatccaaaacttgaggaagccctgaaactactggaaaaaatgatacagtaacaacgggagcggaaagggccttatgtcctttccgctcctaaattcgtttcagattggattgtaaatcctgcggttgggagcgtacaaagaagcccggattttatatactttaagtggttagttagatatggctaatccagcaaggcacgtcactggcgcgctttgctggatacctcgaaattaaaatagaccaggaggaatagagtgatgaaacaggcacttgacacaagaacaaagctcttaacaaaaagcccctggccgctgatgattgaacttagcatccctgcggttcttggcatggtggtcgttgggctttataacatgatggattccatctttgtcggccagatggtcggtgacgtgcagatgggagccatatcggtatcctatcccttgacgcttatcaatgccggttcagcggccatgctgggcgtgggttctgcatcggtactgtcccgcgctatcggcaagaaggatgaaaacacaattaagaagatcatgggcaacctggttgctatggttcttctgctgtccgttatctatacagtggtaggcatggtgttcacccgccagcttttgtccctgaccggagccagcgacaacattttgaattatgcggaaaaatatttacggattatctttgccggttccttgtttgtaaacttttttcaaagtgcaaacatggtcattcgcggagaaggccagcttaaaaaggcaatgacgattattgccagcggcgctattttgaatatcattcttgaccctatttttatcagtatcctgaatccctacggtatgggcattgaggcggctgcttatgcaacgattttctcccagtttgtccaggctgcaattacgctgtggtatttcaagaaaaaaagtcctcatgtgaagattgggcgcatccgcattgacggagaactgcttccccaggttctttctgtcggggtatctgctctgttgatgcagattctgaccttggtacagcagacagtgatctatcgtgtggcatcgaactatggcggggaaacttcacagcttcttttaggtgcggcgctccgcttctggaatttctctttcgttcctctgtgggggatcagtcagggattccagcctgccgccggtacaaactatggtgcaaaggactatgaccgggtaaagacgctgaccagggtttttattactgctgcaacgctgctgtcgctggtgttctatattcctgccgagctgtttccagagaagattttatccatgttcctgacaacgccgggtatcgcggcatcgggtgcaaccaacttccgtatcatgttcagcacttatgtcctgcaaggcagctttatgattgccgtaaccctgttccagtctttgggcaaggcgaaaaaggcaacttggctggtgctgttccgccagattattctgtttattcctctctgcgtggttcttccgatgatcggcggcatgggtattcgtggcgtatggctggcgattgctctgacagatgcaattctggtggttattaccgtttctatgatgctttatgagtttggcaagctgccggagacttcttccgtaaatcggtgaggagggagcgttcatgtatctttgcgatggaaaaataggaaatgaatataaagttgaggatattgatctgcctgtcaatatagaaaagcgtttggaggcccttgggatgacccgtggaacctctatcgctgttctgaacagcaaaagtcggggtgtcctgattgtgaaagtcaggggaacacgctttgcacttgggcgcaatatcacaaagaatattttagtggggtaaattccgatgagagaaaatttgactatcggcttcatcggaaatccgaactgcggaaagacaacacttttcaatgcttacaccggtgcaaatctgaaagtggcaaactggccaggtgtaaccgttgagaaagtagagggtgccattaaagaccatgatctgaatattcgactggtcgatcttcctggcacttacagcctgacctcctacacaatggaagaacaggtatccagacagtttatactaagcgatgaagtcgatgtgattattgatgttgcggacgcttccgctctggagcgaaacctatacttaactttgcagcttttggagctgggcaagccggttgtgctggcgctgaacatgatggacattgtggaaaagcgcggcatggagattgacacacacagactgccggaaatgctgggcatcccggtcattccagtttcagccagaaaacggacaggactggatgtgctgcttcatgcagccgcgcaccataaagactgtaaagatccggagtgtctgattcatcatcataaatatactccaaaacaccggcacgaccaccattcagaatacgcaatggtttacagtgatgctattgaggacaagattgatcttatcatggcagagctgaagcggaaacatccgaacctgtccaattaccgctggcacgccattaagctgctggagcaggataaggaaatctctgcacgttatccggtcaatatgccggatgtgatcgaccggaactatgaatccgacattatcaatgagaagtatgattttattgaggaaatcatcagggagattctggtcaataaggatcgtcaagacgctttgacggaaaaggcagaccgtgtattgacgcataagttttggagcatcccgattttcctcgttgtcatggcggcggtgttcttcctgacctttaccattggcgattggctgaaaggattcctggaattaggaattgagagcctgtcggcattgataagcgatggactgattgctgtcggggtcaatgaagtgctgcgctccctgctggtagacggcatcatcgccggtgtgggcggtatcctgactttcctgccgaacattttcattctgtttctggcattggcttttctggaggacagcggatatatggcccgtgttgcgtatgtcatggaagggattatgagcaagctgggactttccggacgggcatttatccccatgattttgggatttggctgcactgttccggcaatcatggcttcacggtctttggaaaaccggcgtgaccgttttaaggtcatgttgattacgccctttatgagttgcagcgcccgtctgccaatctacatcttgtttgccgagatgttctttcaggaacgcgccatgctcgtggcctattccatgtacctgatcggcctggtggtcgctatcctggtagcggcgatcatccatttgattgaccggagaaaatcggaaaattatctgctgattgagctgccggaatataaggcccccagcgccagaactgtggcaatctatgtatgggaaaaggtaaaggactaccttaccaaagcaggtactaccatctttgtagcatctatccttatgtgggtgatcctgaactttgggccgcatggctatactatggaaatggcagacagcttcgggtctatcctgggccattggcttgtaccgatctttgcaccgattggactgggattctggcagatagcggttgctctgattgctggcatctctgcaaaagaggttgtggtgtccagttgtgccgttctgtttgggattcccaatatcaactccggcgcgggaatggatacattggtcggcatcctgagtgcagccggttttggacagctcaatgcgttttgcctgatgattttctgcctgctttacgttccctgtgcagcggccctggctacaattcgcaaggaatccggcagtacaaggtggatgctgttctcggccctgttccagttggttgtggcctgggctgttacttttgtggtttatcgtgttggacttttgctgtgaggtatgaatatgacgtttggaaaagtgcttcgttcagcggccattttatcagtggtcgcatttggactttggattttgaaaagaggatcggagacccaaagctaataagttgtgagtttccagtcagaaaggagttttagatgcttgttactggtataatccttatcgggattgttttctatgcaatatgggctgtgcgaaaaatccataagaaccgcaaaaatggttcttgttgtagcggcagttgttccggttgtgtaggaaaggaatattgcagcaaataaaatcccgcatatagccgatgttttccgttttggagggcatcggctttttcgtatatttgcacattcggcagggctgcactataatagaatttgctttctgattggattgcacatcctgccgattggagcggtataaaatgagaaaaaactatataataaaagacgccaggagaatcctggcagaacaaatacgagataacggaatgaatactatgaacaaaaaccctatcaccaatgctacggggttatctgcgattattccaaaagataatgacggatattgcaccgtctataaaatggactgtgaggatggcctggggcttatgacagtctatcaggtttatcccggtatccagcttatttacaatgattttgaagcaacgagttgttattgggacggaaccattgataagaatgtgctggagatcaatcattgccgggaagggcgtgaagggagcgtattgcaaagcggttcctgcctgtacctcggagaaggggatctttccattcatacaatggataactgtgcttctgaaatggcctttcctttgagacattatcgcggaatctcagtagtgcttgatctggagctggtttctcaaaatccgcctggaatcctcgccgagagcggtattggtattgcagatttcaaaaacaaattttgtgccgatggctcatgctttgtcatgcgggccaaggatgagattgagcatatcttttctgaactgtattccgtaccggatcgcctgcaaaagccatacttcatgctgaaggtgcaggagcttctcttattcttgtgtatggtggatgtaaataaagaaaagcagcgagagttatatacttctccccaggtggagattgtacgggacattcacaagcggcttatctccaacttgcaggaacggccaacgattgaggaactttccaaagagtatcttatcaatacggcaaccttaaaggatacgttcaagggagtttatggacagcccattggaacctatatgaaagtgtaccgcatgaaacaggccgctgctctgcttcgtcagacgcaggcaaccatagcagaaattgccagccaggttggatatgagaatcagagtaaatttgcaacagcatttcgagatgtcatgaagattgcaccggctgaataccggaaacaaaatagtggcgattgattgggctaggaaaaattacgtctactgccggaggcaaaataaaaccagcagaaacaaattgcattttgccctgctggttttattcataattttgtggatcggaggatttgtaacgtcggctgataaactgctccgccatataatccagtgttttcaagataatctgccgctcatcctcggtacaggccagaaactttcccatgaaatgctgtacttgcttttcctgttccgaagcgtcaggataaaacagctcattagcagaaatgcctaatcgcttgacgaatcttgtcagtacagatgaagaaccgcattatggaaaatatggaatgctacggagaacatatctgaaagagcatcgtccggcaatgtattcactgtatatgttggaagacagactgacagaacatctgaatactgtggacgatgaagcacaggagagaatggatattctggtgcgtcagatgatggagaggcagggcattacggaagaattgaaagtttgtgatcagatggaatgggtcagagcggtaaatggtattcgtaatatggcagaagagattgtgttaaaagaattggtgtatatttaaagtgtggaaagctccttcgggagttttttgctgtttataagataaattctgtcggaggttttgatttaataaccgtagcaggaattccctcacctctatagggacgccactgaaaaagtctttattttgcataaagcagtacaatataaagtgtttttatttgttttaatctactatataatgtgtataaaaatagtttttcagtggcgtcctataggtgatgggatgaattgcacattcgagcatgtctgctcaaattcataaaaaatcgcaaaaacacttgttctgatacaataaatatattataatagaaaaaagaacaatatgctcttggaatttggacggtcgaaataagcaataagtgagtgtacataatgagtttagataataattctcattcagtgtttttgtttgattctggttatgaaatatagcagaaagatgctggacgataagatgtcagagagaacaaaagaaatctttgaaatatagcacctgttgaaacaatccatcagtatatagagagtcagggtgagaaagataaaccgggcagtaaaaataaggatctatccaaataaagaacagataacccagatagagaagacgatcggctgcagtcgttttctctataaccggatgcttgcggataagatccgccattatcaggaagaaaaaagatgctgaaaaatacgccggccggatataaaaaagaatatccatggctgaaagaggtagattctcttgcgctggcgaatgtacagttaaatctggaaggggctttccggaaatttttccgggaaccgggagtgggatttccgcattataaatcaaaaaaacattcgcggaaatcctatacaacgaatatggtaaatgggaatatctgtctgcaggacaggttcctgaaactgccaaagatgcagccggtaaaaataaaactccaccgtatgatccaggagggatggaagctgaaatcagtgactgtgagcagggaaccgtccggaaaatattttgccagcctgctgttcgactgtgaaaaccaaacagtggagaaaagacaggcggaaaaattcctggggatggattttgccatgcatgggatgtgtgtattttctaccggtgaaagagccggatatcccatgttttaccggaatgcagagaaaaaacttgcccgggaacagagaaaactttccagatgtgaaaagggtagccgtaactatcagaaacagaagaaaaaggttgcattatctcatgaaaagataaagaaccagaggaaggatttctagcataagctcagccacagccttgcagaagactatgacgcggtatgtgtggaggatctgaacctgaaggggatggccggaggcctgcatttcggaaaagggatacaggataacggatacggtcagttcctttccatgcttggatataagctggaagaacgtggaaaatatctgataaaagtagacagatattttgcatccagcaagatatgcagtgtatgcgggcataaaaagaaagagctggcattatcagaacggacatacctgtgcgaatgtggaaaccggatggaccgggatgtgaatgcggcggtcaatattctggaagaaggaaaaagaatatataaaaaatgtgcataatagcacagaaaagatccgtaaccggataaaaaagaaccgcgggacacgcggggatagcctgttttagctttgccctgaagggcaattgagcaggaagctcccacttcaaaatctgtaagatttaagtggcgagagcatgtcactattcaagagtttgttttttcctttttgagaatggaacagatgaggtacagtttgtactggttttcaagctttccagattcggtcgtaatgcggcagatgttttaaattctttgcagaggatgcaggattttggagtgaatctgatctgtgtagaagatgggattgacagctcaaaagatagtggaaagctgatgatttctgtcttgtctgcggtggcagagattgaacgggagaatatccttgttcagacaatggagggacgtaagcagaaagccagggaaggaaaatggaatggtggatttgctccgtatggttatgaattagtaaatggagaattgcagattgcagaggacgaagcagagattattcgtctgacctatgacaaatttattcataccaatatgggaatctctgcgattgctgcatggctgaaccagcatggatataaaaagaaaaaacgacagaataatacactggacgcatttgccgcatcatttataaaaggcgttctggataatccggtatactgtggaaagctggcttatggacgaaggaaaaacgagaaagtttctggtacaagaaatgaatatcgcattgtaaagcaggaaaattatatgatgcacgatggtatccatgaagggattatttcggaaacagactgggagctggctcatcaaaaatgggaaaaaacaggtgtgaaatatgaaaagacacatagcctcgatcatgagcatattttatccggaatattgagatgtccgttatgtggaagcggtatgtatggaaacgtgaaccgaaagaaaaagaaagacggaaccttatataaggattatttctattatgcctgcaaacatcgtcgcctggtagatggtcataaatgtggatatcgtaaacaatggagcgaggagaagattaacaatgcagtggaagaagttattcggaagctggtgaagaatccgaaatttgaagaagcaattctgaataaaatcggttcaagaatagatacagaagaaatagaaaaagagattgaaagactggaaaaacagcacaggcagctgaccggagcaaaagcaagacttggacagcagatggacagtctggatatcatggataaattttatgagaagaaatatcaggatggcgttttaggatatgttcccgtgtacgaaaaatgggcattttattgttattttgaaaagctgcgaggcgtttcaggaagagcaaactgttgaagtcaaaaagtggctgggagcgttatatttaattcactttggcaaggtgatatgactgtatggatcaaggttggttgcagcttctgacttttatagccgtaatcctttaatatctttaatgcgtgataagatcatattgcaactgcagctgataatgccaggcagtgtatcaatgacattgtgcaggaagtactccatttcatcacctgatgaagcaacggcatgtacatgaagcctgtctcttcctgtgacacggtaaatctgtgagactgtatcatttttgtacaatatatctgtcacctgcgccaggtactccggttttgtttcaatttcaaaatagcatgatacagccccactgattttttgcggattaataattgttgtatattcttcgattacgcctcttttctccaaagcctggatacgggcttttactgccactctggaaataccggtttcttcaccgatatcagagtaagagatacgtgcgttttctataagcagccggataatcttctgatccagctcatctaaaccgtccaggtacataagttccctcctgtaaaataatataaaataatatccatctgatagcagcttttttcaatatcaaatatcatatcatttatattactaaaagtaaacagcagcttgacttatttgctgtaactacatataattgttgcgtaacgaaatcttaaacttacattttgaaaatacaatcgtgatttcggataaaaagcaggaattgatggaggaaaatgagaatgtcaaaagatgaatatttaatcacagatgcccctcttaaagcactgactgtttttgcaatgcctatgattctgggcagcttctttcaacaagtatataatatggctgattccattatcgtaggtcagtttgtgggatcctctgcacttgcggcagttggagcctgtgccgctttgaccaatgttttcatctgtgtggctttgggagccggtgtaggagcaggtgtacttgtgagccgctattttggagctcagaattatagcaaaatgaaaacaattgtgtcaacatcgttgatcagttttctgattctgagtatacttctgggggtttttggctttgttttttctcattttatgatgagtttattacaaacacctgctgacatactggatgaagcggtactgtatctgcgtgtttattttgtgggatttccctttctgtttatgtacaatatcctttcaacgatgttcaattccatcggtgaatcgaagattccgctgggccttttgatattttcttctgttttgaatattgttatggatctttggatggtggcaggtttagggctgggtgtgttcggtgccgcccttgcaactctcattgcgcaggggatttccgcagtgttttcgcttttgattttctttaaccggatgcgtcgatataaaagccgctttaactggtttgacaggcaggagttacattccatgcttcgtattgcagtaccatcggttcttcagcaatccacagtgtcaattggtatgatgatcgtacaggcggttgtaaatcccttcggtacacaggcgctggcaggttatgcggcaaccatgagagtagagaatgttttttcactgatatttgtatccattggaaatgcggtttcgccctatgtttcccagaatcttggagcaaagaaaattgaacgtattaaaaaaggatatcacgctgcactggtgttagatctgtgtttcgcagtccttgctttcatagtcattgaaacactgcacaccccaatttcttccttattccttggaaaagatggaaccgctctggcatatcaggtgtccggggattatatgaaatggctgggatatttctttatttttatgggtattaagatggcaacagatggagttcttcgtggacttggaattatgcggccgtttctcattgccaatatggtaaaccttgccattcggctgtcagttgccttgatttttgcaccgcgttatggaattgcatttgtctggcttgctgtaccggccggatggcttgcgaattttctgatctcctatggggcacttagaaaatcatggccggttgatgaaggagtttcattccggtaaatttctcttaagttttgatgggaagctggatttgtatgttaagaggtatattttcgttactgttcactggccaatggtatttagataaataaagcatattccggagattacttgacatttaaaaagaaatgccttgaaaaatttatgaaatatgaaaatggttaaattcttgttcgttttgtcaacgacaaataagcagattttcatctgcttgaaaaagtgatatactatcagttgatgatactgtttaggaaacacggtatatcagatatttgggttttctgaaatgagccgttttaagtcttgggaattgtcgatcgcagcggatcgggactaattccttttgtaacagtgccatcacatttatggaatctgtctccgtgtggagacggagatagattctgcatatatgtgcagcaagcgtaaagtttactttataggaatatttacgtttcccatgaacgactacagtatgagcaacaagaagttccgtggcattataagcgataaacttcgcccatatttcctgttttataaaatcaggtttatagctgtgataatgacttaatccaatcgtatatttcaattttcgaaaagaggattcgatcccccatctggaattatagatttctttaagcttttcaacaggaaagtttttttccggaagatttgtcacaaggcattcataagtatcttctgatattggaaaccgtacgatccgaaaagtcagatcataagtatcttctgagccatattttatgtagtcaaaagaagctgcctggtcaacatatcttcggtaaaaaccatctttgatttttatagatttacgatgggatctcgtaagagttacgtcaacagttatatcaaatgtatcagaatccggaaaaacaaagttcccaatcaaccctttgcttgtaatgtcttttgtacgaaaaacaaaatactgttctttttcgatcacgtgagccatgttgttataagagcaataccctctgtccccgataaaaatagttctttgatccgggtgagggatatgtctgtctacaagctggcaaaaagcaaggaactcatcttttttgtgtgcagactgaagaatggcatcggtatagatccgtttatttatgtcataaaaggcattaatgtgtatgctgtaaaagccggaggcagaatgtccttctgagataaaataatcatcagacgaatactttgaaaagctgaaaaaagaagtagtagaaccatcagcagcaatgtattgatactgctgttcctgctttgaaagttcaagcttttcggaagaagaagtaaactcatggaatacagcttccagagcctctggcatcatttgggaacgcctttgatttagggcagatatagaagggagatcctctgacatttgaaagaaatccagaaattcgcatttcgtggatgaagcgccttgagaaataaggaacgaaataacatgatctggagaaagttttcgtatacgagaataatcgcgtcccggattataaacaaaggaatccatatgcgatgtaaccgttgctatagaatgcttaagagtatctttaagttttaaatggaacataggtatgtgcctcctgaattagaaaaattttaatttctaattcaaaggccgctctcattacctcacaataatatcagtaatgagagcggccgcagattccagcttaaaagtcaaggcttttgtaatctttttgttagacccttaagactaactaagggtatagattatctaaataccattggttcactggcaatatcctgcgaagcgtgttgctgtgaacagtaacatattttcttatagacatgatatagtatgagtgctataataaaaataattttttatggcatttattggcaaaccggttgaaaagccggggcgcaaagccagaaggagctaaagtcagattgaaatctggccatgccagccggttgcatcatgcctcagtaataaaaaaaggtaaatgttaaatgggcattatggaaaaagttcctgtaaaattttttacaaggaacttttttttgtcttcaagcggatattcgcaacctccgcaggggacttacctgattcggttaaatttgatggaaaatagagaagaacagcaggaatggagaaaagatgaaaggaaaaagagtgattgcaggcattctgcttgtgggaattttagcaactgccctggcagggtgcaaaaatgcagatgttactaaaaaagaaagagaaaagcccgttatcaccctgggcagtgacagttatccgccatacaattatctgaatgaagatggaatccccacaggaattgatgtggaactggctacagaagctttcagaagaatggggtatcaggtggatgttgtccagatcaactgggagaagaaaaaagaactggtagaaagcggagagatcgactgtattatgggctgtttttccatggaaggacgccttgacgattaccgctgggcaggaccctacatagcaagccgccaggtagttgctgtaaatgagagcagtgatatctataaactaagtgatctggagggaaagaaccttgccgtccagtccacaaccaaaccggaaggcatctttctgaaccggacagatgaaaggatccccaaactgggcaatctgatcagtcttgggcacagggaactaatctatacctttctgggaaaaggatatgtagatgcagttgctgcacatgaggaatccattgtccagtacatgaaggattatgatgcaagcttccgtatcctggaagatccgctgatggtggtcgggataggtgttgcttttgcaaaagaggatgacagaggaatttgtgagcagatggatcagacgctggaagaaatgcgtcaggatggcacatccctgaaaatcattaaaaaatatctggatgatccccagaagtatctggaggtggatgatcttggatattaggagaagaataaaagtaaagcgattctggatattcggcattctgcttggaatctgtgtgactgcagcttccctgtattacttttttcaggcagagaaaaaggaagcagagaacaggatggtgaaaactgtaaactatgtcaaagtgcagtgttccacctacacccattataatgaagcttcggaatctaaaagtctcctccgcgccattgaaagtgccagacagatgagtacgaatatcgacatggaaacagaaaacggcggccggctaagccaggagtttctgaaagaaaatctgcagaccctctgggtggatggtatccttgtgctggatgcagagggaaagacagtctgcaaatacagcatggatgaggctctgaccaatgggatcacagattatctgcaaaaagacattatcatggattttaccggatatgaagaaagatcttattcggaacggattgaccgagaagacggatcacgtatcgacattgcagcctgtgccagaaaagatgcaccaggtatggttgcaatttattattatacatcttcggaatttgtcagaaattataccctgacaatacagaaccttttaaatggctatagcactcagaaggatggaacgattattgttgcagacaagggaaccattgttgccagcaacgatgaaagcctgctgggacaggatactgccggcaaccaggttgtccaggcaatgaaagagcatacagacagtcagcatatttttcatttaaaaaatgaaggaaccggaggttacggaatcatgctgaagcagcgggattattatatttatacctatcttccggatacggaagtattccgtaacctgccactaagtgtaacagctgtcgtttttctttatttactcatattcggtatattctgcttctggggttacagagcggatctggcacatcggaaacaggaacaggaaaaagatgaaaaatataaagcagaacttctaagagcagcaaaaaaagcagaagcagccaatgaggcaaaaactgagtttctgcagagaatgagccatgatatccggacaccgatcaatggaatctgcggcatgatcaatgtggcagaccattatgcagacaatatggagaaacagacggaatgcagggcaaagatcaaaaagacatcccatctgctgctggaactgataaacgaggttctggacatgagcaagctggagtcagatgaagtggttctggaagacatcccatttaatctgaacagtatttttgaggaaatactgggtgtgatcgaacatatggctgcggagcagaatatccggatcatttgggaagagaaagaagttacacactggaatcttattggaagtccggtgcatgtgaaacggattctgatgaatattttgtctaatgcggtgaaatataacaaagaaaacggatatgtctatatcggctgtcgggaaatcccatcgaaacagacagcaatgaccacattggaatttgtctgcagagacaccggaattggaatgacagaggcattccagaaacgcatttttgaaccatttgcacaggaacatgcaggaagccgcacaaaattcgccggaacaggactgggaatgccaattacaaaaaaactggtggagaaaatgggcggaaccatttcctttgaaagtaaagaaggtacagggactacatttgtgatccggattccattccagattgatgcagatatgaaggataggactgaaacggaagaaaaaacagaaacttctatccaggggctccatgttcttctgacagaggataatgagctgaatatggagattgcagaatttgtgcttcagaatgaaggcgctgtggtgacaaaagcatggaatggacagaaggctgttgacatattcagaaaaagcagacctggagaatttgatgctattcttatggatattatgatgcctgtcatgaatggatatgaagcagcaaagatgatccgctctctggacagagaggatgcaaaagtgataccgatcattgccatgacagcaaacgcgttcactgaggacaaaatgagagcaaaggaagcaggaatggatgaacatattgccaagcctgttgatgggaaattattagtaaaagtgatcaatgagttagtaaaacgcgatcagagggagaagttataatgaaaaagaaaaaatggaacaagttagtttctgtgcttttggcgatggtgacagccgtatcacttctgtctggctgcggcgggaaaagtgcggaaaaagaagatgcagaaaccatcacagtgtatttatggagcacaaagctgtatgaaaaatatgcgccatacatccaggaacagcttccggatatcaacgttgaatttgtagtaggcaataatgatctggatttctatcgttttctgaatgaaaacggcggattgccggatattataacctgctgcaggttttccctccatgatgcaagccccctgaaggacagtctgatggatctttccacaaccaatgctgcaggtgctgtctatgatacctaccttaacaatttcaaaaatcaggatggcagtgtaaactggcttcctgtgtgtgcagatgcccatggctttgtagtgaacaaagatctttttgaaaagtatgatattcctcttccaacggattatgaaagcttcgtttctgcctgccaggcatttgatgaggtgggtatccgtgggtttactgcagactattactatgattatacctgtatggaaacactgcagggtctgtctgcatcagagctgtcttctgtggatggacgtaagtggcgtaccatctacagtgacccggacaatgcaaagagagaaggtctggacagtattgtctggccggaggcttttgaacgtatggagcagtttattcaggatacagggctgagccaggatgatctggatatgaattatgatgatgtggttgagatgtacaaaagtggtaagcttgccatgtatttcggcagttctgccggtgtaaaaatgttccaggatcagggcattaacacaacattcctgccattctttcagcagaacggcgaaaagtggctgatgactacaccatatttccagatagctttaaaccgtgacctgacaaaggatgaaacacgtcggcagaaagcaatgaaggtactgaacacaatgctttcagaggatgcgcagaaccggatcatttatgatgggcaggatctgttaagctatagccaggatgtggatttccggcttacggaatatctgaaggatgtgaaacctgtgatcgaagaaaaccatatgtatatccgtattgcgtcaaatgactttttttccatttccagggatgtggtgtctaagatgatctcaggagaatataatgcagagcaggcttatcagtcatttaattcccagcttcttgaagaaaaatccacttctgaggatattgtgttggattcaaagaaaacttattccaatcgtttccataccagcggaggcaatgaagcctattctgttatggcaaacactttgcgcggtatttatgggacggatgtgctgattgcaacaggaaacagctttacaggaaatgtactgaaggccggttatacagaaaaaatggcaggcaacatgattatgccaaacgagctttccgcttacagcagtgagatgagcggggcagaactgaaggaaacggtcagaaacttcgtagaaggctaccagggaggctttatcccctttaaccgtggctctctgcctgtgttcagtggtatttctgtagaaatcagggaaacggataatggttatacattgagtaaagtttcaaagaatggaaaacagattcaggacaaggatacttttactgtgacctgccttgcagcaccacaatatatggaagcttatccagcagaggaaaatattgtatttgatggaggggatacctctgtggaagatacctggacaacatatgtttcagatggtaatgccattcttgcagagcctgaagactacattactctgaggtgagaagaatggatgttaagaatcataatacaaacagaaagaaacgggttgtgagaaaacgatggaatgcagcagttcttattgccctatttgttggaatccttttgactgttttccaatatttggggtttgtatcgaagactgtttatgaggaaagtgtttctcacctgacagaaatttttcatcagtctgataatatgctaagtgagctgacaaataagaatctgacttatctccatatatggggggaatatctgcagaacacttccgatgaaagtgaaattcgtgagtatatagagaaagcacaggaagatgcaggctttttagatttttatttcctgtcagcggacgggaactataagatggtaacaggtgaaaccgggtatctgggattacaggaaaatattgaagatgagatccggcagggaaatgatgtgataaccaatgcaacagttcccggaaaatcccagctccttgtttttgccactcccaggcctcatggaagttatcagggctttgaatatgatgccattgccattgcctatgaaaactctgatatcgtaaatgtgctgaatatttctgctttcaatggaaatgcccagagttatgtggttcatccggatggccgtgttgttgtggatcattcttctgaggcatggggagaggtgtataatttctttgggattctgagagaacattctactctgtctgaaaaagagatccttaagctttcagaagagtttaaggaaggacatacagatgcaatgctgataaatctggatggagaggattactatctggtctatgagaaatccaaacctcaggactggatctttctgggacttgtccaggctgatatcgtcaatgcaagtatgaatgttctgcagcgtagcactgtgctgcttgtaagtgcagtagcggtgtgtattgccggtctttttattggaattattctccggaaaaacagggtaaacctgaagagaaaggatacggagatcctgtacagggacgaattgtttcaaaagctgtcaatgaatgtagatgacgttttcctgatgctggatgcaaaaacatatcaggcagattacgtcagtcccaatgtggaaaaactgctgggaattacagtagaacagattcgtaaagatatttgtgtccttgggaaactgcatcccggggacgttgaagatccggagaagaagtatctggaagaaatccaggttcatgagcagcaggaatgggatcttgaatatgttcatcagaaaacaggagaacaccgctggtttcataacgttgcaatgggcagcgaggtaaacgggaaaaagaaatatatcctggttctgtcagatcgtacctctgatagaaaaatgaatcaggccctttctgaggcggtccgcgctgcggagactgcaaacaaggcaaagagcaccttcctttccaatatgtctcacgatatccgtacaccaatgaatgcgatcattggttttaccacactggctgtaagcaacattgatgataaagaaagggttcgggattatctgggtaagattctttcctccagtaatcatctgctctcactgatcaatgatatcctggatatgagccgtattgagagcgggaaaatccatctggaagagacggaagtcagtctgtcagaggttcttcatgatctgaaaaccattatcagcggacagatccatgcgaaacagttagagctttacatggatgtcatggatgttatcaatgaggatgtttattgtgacaagaccaggctgaatcaggtactgctgaatcttttgtccaatgcgatcaagtttactcctgcaggcggaaccgtttctgtccggctgagagagtatccgggtatacagagaggctgtgaactgtacgaaatccgggtaaaggataacggaatcggcatgagtcaaaaatttgtacagaagatattttctccttttgagagagagcggacttccactgtaagcaggactcagggtacaggactgggcatggctatcaccaagaacatcgtggatatgatgggcggaaccattgaggttcaaacagaacagggcaaaggtactgaatttattatccgtctgccattgcggattcagcctgagaaccaccgtatagagaaaatcgcagaactggaaggtctgaaggcattggtagtagacgatgatttcaatacctgtgacagtgtgactaagatgcttgtaaaggttggaatgcgttcggaatggacactttccggtaaggaggctgttctccgtgcacgacagtctatggaaatgggggatgcattccacgcttatatcattgactggcgtctgcctgatatgaatggcattgaagttacccgtcagatccgcagtcttggtgatgatacgccaatcattatcctgactgcttacgactggtcagatattgaagtggaagccagggcagcaggggtgactgcgttctgtgccaaacctatgtttatgtcagatatcagagagactctgatggctgctatcggtcagaagcaggccggggcagaggataatattcttccggcagcagatttagatttcagaggcaggcgcatactgcttgtggaagataatgaactgaacagtgaaattgcagtagcgctccttagtgaatatggttttcgggttgatacagcggaagatggagcagaggctgtggagaaagttaagaattcaacaccaggtgattatgatctggtgcttatggatgtgcagatgcctgtaatgaatggatatgaggctactgagcagatccgttcactggatgatccggcactggcgggaattacgatccttgccatgactgccaatgcttttgacgaagacagaaagaaagcactggcatgtggtatgaatggatttctatccaaaccaattgttatagaggaactgatcagtacattacaaaacagtctggggtaagttttctgtttgaactgtgataatgggatatgaaaagtggtttgatgaaagcaaggaggagcaacgaatgatttgtggaatgacgtattttcagatatgtctgtattttcttatttattcttttggcggctgggttgttgaagttatttttcatgcagtagcgttgggaaaagttataaacagaggtttcctgaatggaccggtttgcccggtatatggatttggggtgctttctgtttttgctttgctcaatacaattcagggcagcgggcgtcagatgagtgatggaatgatttttgtgtttggaattgttctggcaactgcggtggagttggttgcaggctggctgctggatgtgtgtttccacgcaagatggtgggattattcagataaaccctttaattttcatggctacatttgcctggagttttctctgatctggggactggctatcgttatggtagtaaaagttttccagaagtatgtagaggcacatgcgttacatacacctgcaacctgggaatggattgtgatagcagttttgtatgctgtgtatctgacagattttattgtgacggtagcagtgatccagggactgaataaaaagcttaccagactggataaggttcgctcagatctgagaattgtaagtgataaactgagtgatacactggctacgactacgattggcacagcacagaaagtgggagaaggaaaggttcaggcaactcttgcagcagcagaactgcgtgatgcaactgccgcacagcgagaaaaatctatcgaaatgcttcgtataaaaagagcggagcttcaggctcagtttgaggaactgtccagttctattaccaatcataccgttgtcggtcaggggcgtatcatcaaggcatttccgaagatgcagcacagagactattccgaactgattcaggagctgaaaaagagattaaaatagattaaaatgcagagggaggcttcaggtgaacagacaggcagtacaaaccttaaagacttattttggatatgatacattcagagaagggcaggagagtgttgtggagtccattctggaacaccgggatgtgcttgcaatcatgccgacaggagccggaaaatccatctgttatcaggtaccggcactgatgctgtcaggaattacgattgtaatttctcctctgatctcactgatgcaggatcaggtaaaggctttgaatgaagcgggaatacatgccgcatttatcaattcttcactgtcggaaagtcagattagcaaggcgttgtacctggcagcaggaggaagatacaaaattatttatgttgcaccggaacgtctggaaaattatgagtttctggaatttgccagacaggtggagatttccatggtgacagtggatgaggcacattgtatttcacagtggggacaggatttcagaccaagctatgtcaaaatcgtagactttgtaaaaaatcttcccggtcgtccgatcgtcagtgcttttaccgcaactgcaacagaggaagtaaagaacgacattctctgtactttaaatctggaagatccgaaagtagtgatcaccgggtttgatagaaagaatttatattacagcgtggaaaatatccggcgaaaagacgattttgtgatggattacatagacagacatccaacagagagcgggattatttactgttctacaagaaaaaatgtggacaatctttttgaactgcttttccaaaaaggagttgctgttaccagatatcatgcaggactgaataatgaaaccagaaaaaagaatcaggatgatttcatttatgacagaactcctgttattattgcaacaaatgcatttggaatggggattgataaatccaatgtgagatatgtgatccattacaatatgccgcagagtatggagaattattatcaggaggcaggacgtgcagggcgtgacggagagaattcacagtgcgttctattgttttctgcacaggatgttataatcgaccgaatgcttctggataacaaagatttttccgatgtggatgaagaggatgaatttctcattcgtcagcgggatatacgaaggcttcagatcatggaaggatattgtaaaacaacaggatgtctgcgaaattatattctggagtatttcggtgaaaagaccttcggtccctgtgataattgtggaaattgtcacagagaataccatgagacagatatgaccagagaggcgaagtgggtagtgaactgtgtggctgagacgagaggaaggtatggactgacaattgtgcttggtactctgctgggggctaagagagcccggttgagggagcttggagcagataagtataaatcttatggagcattgaatgatcacagtgaggcagaactcagggcactgatcagccagatgactgagatgggatatctctatcagacacaggaacgttacagtgtgctgaaactgggcgatatttctccgctaagagatgaaaatactcacgtgatcatgcgtacttacgaggaaaaagaaccggataaaaagaaaaagccccagaaatctgtcagaaaacgcagtacagatgcgcttacggcagcaggttacgatttattcgaagccctgcggaaacttcgtctggaaattgcaaaagaggaagccatgcctccatatatcgtgttcagtgataagacgctgatagatatgtgcatcaaatgtccatcaaatgaagaagaaatgctggaggtttccggtgtgggcgagaataagctaaagaaatacggtcagagatttctggaagagatacagaagttctgcctggaacgtccgaatgcggttttgagtatgtcggaagatgaaaatggtaatccctgagaacaaaggttggaaaacagatgaatatagaaaaatatacggaagaattaatcacattgagacattactttcatcaacatccggagctggcacttcaggaagtggagacgtctgcatatatccggaaatatctggagaaactgggatatgagattgtgccgatagaacctacaggattgatcgcggaacttccatctctgagaaacagagagaaactggttgtactcagggcggagatggatgcattgcccatacaggagcagacaaatctaccatacgcatcagtaaatcagggatgtatgcatgcctgcggtcacgatatgatcctggcagcagcactgatccttgcaaaaattgtggcagaagagcaaagaatgcaggaaagttttccggtcagactccggttcctttttgaacctgcagaggagattggtgaaggtgcaaaaagaatgcttcaggccggagcattagagaatccgaaagcagatgcatttctgatgtttcattacgcagcggacatgacatttggaatggcagtgcatcagggacaggcatcttccatgatcaacagtatgcagattcatgttcatggaaaatccagtcactggtgtgaagcggataaggggattgatgcaatttatgctgctgctcaagtgataagtgccattcatgatctgaatgaaagttttggaaaacagcatccggatgcaggaaaatatattgtgggtacgggtacgatccatggcggtgaatatacgaatattattgcagaccatgtggtattaaacggaaatatacgcgcagttcatgaagaaacttacatggcacttgagcacgagctggagagaaatctgcaggaaattgaaaagcagactggcacacagatccgtatggaatttccaaaagatccggtatatgcgtttgccaatgatgaggaacttacagagacagcaaaggtagtgggtgcagaagtattcggagataaatttgttctggaaggagaagatgagttgtttctttccggtgacaacgcatacagatatttcagagaaaccagaggacttttcacagtatttcttgcgggaataccaggagagaatcatcctctgcatcatccgaaatttcaattggatgagagaatactgccgtacagcgtggagacattgtataagattataactacattatgagtattgcaattttggaaaataatgaattgtgatgtggttcagcagagcgtgaaattctactgaactggattaatatattatttacgcagattgctatggaaggaacgtcagcaggatggataatttgtatctgttctgctgttttttgagtatactcctaataatttcagagaatactgtaaattaaccaaattaagtaagccctgcttcaattgaggatatccacctgactctatgaaaaatctcgttactgttcactccgttcacagtaacgtagccaaaattcattccagattgcctgtggcaatggaattttggtttgtatgtctcgggattttggcatattcatgccaaaacacctcgcgggacagtggtgtgtgaacaataacaaaatctcataaataaatgaaaaaaattaccaaaaggacttgaaaattggattaaaatagtataatataaaaacataaacaaattaagaatacatagcaactataacttattaacgttgagtgacagcagattgctgaatagtaacggacagacgatatactataaagaaagaattgagggcagaaatatgaagattacagataccattaaatatgtcggagtgaatgaccatcaggtagatttgtttgagggacagtatgcagtgccaaacggaatggcatataattcctatgtgattctggatgacaaggttgcagttatggatactgtagatgccaatttcaaacatgaatggctggataatcttgaacaggcacttggcggacgtaagccggactatctgatcgttcagcatatggagcctgaccatgcagcaaatgtagcgaactttctggaagtatatcccggcactacagtagtagccaatgcgaagacatttgtaatgatcaagaatttcttcggactggatctggaagggcagaaactggaagtagagaatggttctacactgagtctgggaaatcataatcttacttttgtatttgcgccaatggtacattggccggaggttatggtgacttatgacagcacagataaagttcttttttcagcagatggatttggtaagtttggtgctctggatgtggaagaaaactgggatgatgaagcaagaagatactttatcggtattgttggtaaatatggcgcacaggtacagagacttctgaaagtagcagctactctggatattcagatcatctgtccgttacatggtccggtacttacagaaaatctgggacattatatcagcctctatgatacctggtcctcttacacaccggaggaagaaggaatcgtagttgtatatacttctgtatacggacataccaaagaagcagtcaatcagtttgtggagaaattaaagagcaagggatgtccgaaagtagttgtttatgatctggcaagagatgatatgtctcaggcactcagtgatgcattccgttacagtaagctggtactggcaacaactacctataatgcaggaatctatccgtttatgaatgactttattacccgtctggcagagcataatttccagaaccgcacagtgggccttattgaaaacggttcctgggcacctctggcagcaaaagtaatgaaaaatatgctttctgaatgtaagaagatcaactggctggacaccacagtgaagattatgtccgcagtaaatcaggaaaacagagatcagatggaagcgatggcttccgagctttgtaaggaatatattgcaaagaatgatgaactggcaaataaaaatgatatgacagcattattccgcattggttatggtctctatgtagtaacatcaaatgatggtaaaaaggataacggactgatcgtcaatacagttacccagctgacagactctccgttccgtgttgcagttaatatcaataagacaaattattctcaccatgttatcaagcagacaggggtgatgaatgtaaactgtctctctgtagaagctccgttctctgtatttgaacagtttggtttccagagtggaagaagcgtggataaatttgcgggacagaaggtgaatcgttctgataacggactgatattcctggacaaatatatcaacgcatttatgtccctgaaagtagagcagtatgtagatctgggaactcacggaatgttcatctgcagtgtgacagaagcccgcgtggtaagtgaccaggagacaatgagctacacctattatcagaaaaatgtaaaaccgaaacctgaaacagaaggtaagaaaggatttgtatgtaaagtctgcggatatatctacgaaggtgatgaacttccggaagattatatctgcccactgtgtaaacatggagctgtagacttcgagccgattggatgaaagatttctcttgttaaactgctaaagagtgacattctgttatatgaataattgttgagatttcagagtgatctgattgataaaataaaaaatagagattgtcagtggttaaatcgctgacaatctctattttgctccaatatggtactattattaaatgcagaaaatagtacaattacagttgtattgtaaggatgaatagacgatgggatattaatagaaacattatggaatgtaaagaaattttgatagacgaattcaataacaatatgttacactttataaaagttagagtttaatatatcaaatataaagggacgtgtgtctattgaaacaaattaaaaagaaacttccaataggaatagaaaattttgcaaagcttcaggcggaagatttctactatgtagacaaaacgatgcttatcaaagaacttctggataattgggcggaggtgaatctgtttacacgtccgagaagatttggtaaaacattgaatatgagtatgctgaaagcattctttgaattaaacggtgataagaactgctttaaaggaacaagaatttccagagaagtttatctttgcgaacaatacatgggaaagttccctgtgatttttatttccctgaagagtatcagcgcgcaaacttatgaaaaagcctgtgatatggcaatacagattgtaaatggtgaggcgcgtagattccagtatttattggacagtgaacgtttgacggaatatgataaggatgcgttcaaatcattgcttctgccggatatgaaggaatctgttctgtgcagcagtctgaggattctgtcagaacttctggagaaacatcatggtcagaaagttatcttattgattgatgaatatgatgtgcctctggcgaaagcatttgaattaggatattacaattcaatgactctgctgatccgtaacttgtttgaaaatgcattaaaaacaaatgacagtctgaagtttgctgtgcttacaggctgcatgcgtatctcaaaggagagtatttttacaggattaaataatctgaaagttttgtcagtggcagatgtacagtttgatgaatattttggatttacggacagtgatgtaaagaatatattggaatattatgaactttctgagcattatgatgaaataaaaatgtggtatgacggatatcggtttggaaatgtagaggtttactgtccctgggatgtgataaattattgtgatgaattgcgtataaacaatatggcgcagccacagaattactggtctaatactagcagtaatgaagcggtgaaacgctttattcaggagactgataagggaacggtcagaaaggaaattgagaaactgatagcaggagaaacaattgtaaaggagattcatcaggaactgacatatcaggatatgtatgcttcgattgaaaacctatggagtgttctttttactacgggatatctcacacagactgaaagaaaagatgcaaatacgttcatgcttaccattcctaatatggaaatacgtaatatttttctgacacagattatggaatattttaagaaaactgtttctgagaatggagaagcacttgaaaaattctgtaatgcactaaaagatggaaattccgaagtggtagaacaaagtttgaacaattatctgaaaaggaccatcagtattcgggatacctttgtaaaaaaacagatgaaagagaatttttatcatgggattttacttggaattcttggatttcagcagaactggagtgtgtcatcaaataaagaatcgggtgatggatacagtgatattttgatagaaacagaagatcaggaaactggaatcattatagaaataaaatatgccgaaacagggaatctggaagctgtcagtgaagacgcattaaaacagatagaagacagacgatacgaggagcaactgctggaagagggagtagagcatattttgaaatatggtattgcattttacaaaaagaaatgcaaagtaatggcagtcaaataaatgaaaaacaaatacaaaaaagcagcagaaccattgagggatagtgattcaatggttctgctttttactgtctgtattgatgaagttgcttaatgtaactggaacacaacagtttcgtaaggtttgagtacaagtgttccaattccgtattcaacttcattttctccgtaattggaaatgattacgggagtgttgcacggtaattcaatatcttcagcgccataatggaatttctgcatggatgcagagaaattatgcactgccagccatgtttcatcctgataacttctggtataggcaattaccggaccatcttccgggcagcagagtttgaaatctccatgagccattactggatgtttcttacgcagtgcgatgagattctggtagaatctgaaaacagaacagtcatcattcatctggctttctgcgttaatgagtttgtagtttggattgacacccagccacggagtatgctcagaaaatccgccgtttggactgtcgttccactgcataggagttcttgcattatcacggctgatacttctggattctgccagtgcttcttcaggagaagctccctgttcgatcatggttttataataattgcgggtatcaatgtcattgtaatcatcgatagatgggaaggcaacattggtcattcccaattcttcgccctggaaaacaaagggggtaccgggaagtgtgtgcagataacatgccagcatttttgcagattctgaccagaattctctgtcatttccgtaaagggaaacctgacgcggtttgtcgtgattacttaaaaatcttgcccaccatccgtcttttttcaggatttcataatctttcttaagatcatgtttcattttctctggtgaccatgtctggatttcaacaatcggagggacaaatggaatggccatgttaaattctttgcttgctgcgctggaatagttgatggcatcctgttcattgttgatattaacttctcctacactcatcagattgtcgggagtcattgtttctgcaaccatttcacggatgtagcggtgggttccctccagatttacacacgctacagtaccaatgggttcattcatatctgcacgtccgtccagtcctttgtcaagataactgatggcatcaatgcgatatccgtcaacacctttctcattccagaaacggataatatcaaaaattttctctttagtttccggattatcccagttcagatccggttgttctttagcaaagaaatggagatagtattgtccacgttcaggaacatattcccaggcacttccgccaaatacggacatccagcagttgggtgcgcctccgtccggtgcaggatcacgccagatatagtaatcactgtaaggattattgcgggatttctttgattctaggaaccatttatgtttatctgaagaatggttcaggaccagatccatgataatggcgatgcctcgttcatgtgcaccatcgcggaaagcatcccagtcttccatagttccgaattcttccatgatcgcgaagtaatcagaaatatcgtaaccgttatccacattcggagaagcatagacaggagacatccatactgcattgatgccaagctccttcagataatccagcttctcaatcattcccttcagatcaccgattccatcattgttgccatctttaaaacttcttgggtaaatctggtagatcaccagatctttataccagtcttttttgtgtttcatatgtacatcctttcgtctttttgcataaataaactctgaaattattatattgtattgtgcaaaaaaacgcaatgaagaaaatgagattatttttgataatagtaatacacactctggacatatcagattgtacagaaaaaagaattgtgatagaataggcgcgtaaaatatgttactgtacataagacaatgaaagacggagaacagaatgaacgcaaattttgaatattataaagttttttattacgtatcaaaatatgagaatctgacaaaggcagcatcagtattaaagaccagccagccggctgtgaccaggacgatacataatctggaaaatatattagggtgcagactgtttaccagaagcaaaagtggcatgaaactgactcctgagggaaagattttctatcagtatgtagcagcaggctgtgctcagtttttcaaagccgaggataatcttaataatctgatcagccttgagaacgggaccatttatatcagtgcaacagagacagcattgcactgttatttgtttgaggcagtcagagactttaatattcaatacccgaatgtgcattttaaaattcttaataacagcactacagattctgtaaatgccttaaaagagggtaaagtagatcttgcagttgtatctgcttctttacagttagcagagccactgaaaatgaaagtagtgcgaaagtatagggaaattctgatcggaggcagtcgttttgcggagctgaaggggaggaagacttcgttggaggaactttcagcctatccatggatcagcctgacttccgaggcaatcagcaggagatttttgaatgagtatttttcaaaaaatggactgcagttttcgccggatgtagagctggcgactacagatatgattctcccggcagtacggtataatatgggaatcggattcctgccagaagaatttgccggagatgatctggaatccggaaaggtttttgagatagatgtaaatgaaacacttccggagagaagcattattctgatccatgatacagaatatcctcaaagtattgcatctaaagcattccagaagtttttggcagaacggaaagaacagaaccgctgaaatagaaaagtcatcaggaaatccacatgatgtgaatcctgatgacttattatatttataaggaatttatcatctgttagacggatttatttatgccactcccagtttcgaatctcttccagatcctggccatattcagcaatatactgtttgtgctcaacaagcttgtcattcatcttctggattaagaaggaacctttgtttccaagctgtggaagatgcatgatggcatcctttacaagattgaaacggtcaatctggttctgtacacgcatatcgaatggtgtagtaatagtaccttcttcctgatatccgtgaacagagatattgtggttgtgacgctcataagtaagctcatggatcagtgttggatatccatggaatgcaaagatgacaggtttatcttttgtgaagattgcatcatattctgcgtcacttaagccgtgtggatgtttgtggtcagattccagtttgaacaggtcgacaacgttaacaacacggatcttaagttccggcatttcatcacgaaggatagtaactgcagccatgatctcaagtgtaggtgtatcaccgcagcaggccataacaacgtctggttcttcaccacagtcattgcttgcccactcccagataccgataccctgtgtgcagtgcttaacagcctgctccatggtcagccactggcagcttggatgtttggaagctacaattgcattgacatagttcttactcttgatgcagtgatcgaagcaggagagtaagcagttagcgtccggtggtaagtacatacgaactacgtctgctttcttattggcaatgtgatccaggaatccaggatcctgatgagtaaatccgttgtggtcctgctgccatacgttggatgtcaggatgaagttcagggatgcgataggctgtctccaggaaagctgattgcaaactttcagccattttgcatgctgggctgccatggagtcaacgatacggatgaaagcttcatagcttgcgaagaagccatgacgacctgttaacaggtaaccttccagccatccttcacacatatgctcactgagcatactgtccataatacgtccgtctcttgcgaggcagtcatcagtatcaagcatttctgcgttccagtcacgtttctgatattcaaatactttgtacagacggttggacatgctttcatctggtccaaagatacggaagttcttgttttcttcattcagtttgaagatgtcgcggatgtatccgccaagttcgatcatatcctgagcttttgttttgccaggctgtacttcaataccgtaatcgcggaagtccggaagacgaagatctttcagaagaagtccgccatttgcatgtgggttggcaccgagacgtgcatttcccttaggagccagttcagccagttccgggatcaggcgtccgtttttatcaaacagttcctgaggacgatagctttccagccactccttcagaagttcaagatgttccggcttttccatagtgatcggaacctgatgagcacggaaagaaccttcaatctgaagtccgtcaacaaccttaggacctgtccatcccttaggagtacgaaggatgatcattggccataccggacgttccggattattgttctcacgggcgttcttctggatcgctttgatttcttcgatcactgtgtccattgtttcagccatcttcttgtgcattgtcattgggtcgtcaccttcaacgaaatatggtttccagccacagcccttgaagaagcattcaagttcttcatgagaaagacgggagaagatagtcgggttgctgattttatatccatttaagtgaagaataggaagtacagcaccgtctgtgatcgggttcaggaatttattggactgccaggatgtcgccagaggaccagtctcagcttcaccatcacctacaacagtagttgcaatcagatccgggttgtcaaatacagctccgaaagcatgagcgatggagtaaccaagctcgccaccttcattaatggaaccaggtgtttccggagcgcagtggcttggaactccgcatgggaaggagaactgtttgaacattttcttcataccttcctcatcctggctgatgttaggataaacttcgctgtaggaaccttccagataggtattggcgatcatgaagtttccgccatgtccaggaccggaaagcaggatcatatcaaggtcataacgtttgatgacacggttgcagtgtgcataaacgaagttctgtcctggtacagttccccagtgaccaacaatttttttcttgatctgatccatagttaatggctctctcagaagcggattgtcgagaagatagagctgtccggcagacagatagttagctgcacgccagtaagcatcgattttgtcaagcatttcctggtttaaaggctgcttttccagacataatttgttgtcttccattttcttacctctttctttgtctttgatgtgtatagcttaagatgtcgaagatatctgtataagaaattttctggtggtagttaatgataaacgtttcttaacagataagttggagtgttactttgttattttttaaccgaacacatcctatcatatcagaaatgaaacgtaaaatagaaatattgcattgtaattataagtttttgatatggataaaaaataagctccttctgatgaaatgcggagcagttattcggtatagagctgcgtagcgaagcagattgtgaatatccgcttgacgacaattctctgagtggaaatgattggtgtttaatatggaagatgacgaaaagaactaagcaatgattagtaattttcacgaaaaaatggataacatgaaagttgtattgcaatttgcacaaaaaatagatataataaaaaaaacaattgcgcataaggtatagaaaaactgcttatatgtactagataaagtataggcggtaaaagtgaagaatggcgaaggagacaagaatcatgggaaaaagagcagcaggaatattaatgccgatcagcagtcttccatcagactatggcatcggatgtttttccaaaagtgcatatgaatttgtagactggttaaaggaagccggacagacttactggcagattctgccattgggaccgaccagctatggagattctccatatcagtctttctctacatttgcaggtaatccatattttattgatctggatacacttgtggaagaaggagttcttgataagaaagactgcgagaaagttaattggggaaagaagcctgatgaggtagattatgaaaaaatctacaaaggccgttatcctcttctgagaaaagcatacgagaacagtgatatcagcaagaatcttgactatcagaaattcgtagcagagaacagctggtggctgtcagattatgctctgtttatggcagtaaaagaccgtttcgaaggtgtagaatggaccaaatgggctgaggatatcagactccgctggaacaatgccatggattattatcgtgaagaactctattttgatattgaattccagcagtatatgcagtttaagttctatgagcagtggatgaaactgaaatcctatgcaaattcaaaaggaatccagatcattggagatattccgatttatgttgcaatggacagtgctgatgcatgggcgcatccggagctgttccagctggatcaggataatgtaccaatggcagtagcaggatgccctccggatggattttctgcaaccggtcagttatggggaaatccgttatatcgctgggattatcacagaaatacaggatatcagtggtggatttccagaatgagttattgcttcagactgtatgatgttgtgcgaatcgatcatttccgtggatttgatgaatatttctctattccatacggagataaagatgcaagaggcggacactgggaaaagggtcccggaattgatctgttccgtaagattgaacaggcgcttggatggaagcaggttatcgcagaggacttgggatatatgacagattccgtacgtcatctggtatatgagagcggattcccgggaatgaaggttctggaatttgcgtttgactccagagattccggatgtgccagtgattatctgccacataactatccggagaattgcgtggcgtatacaggaacccatgataatgaaactatcgtgggatggtggaatagtatcacagcagctgagagaaaactggcgagagattatctgtgtgatcatgcaacaccggaagaagaactgtataaatgtttcatcagtctgatcatgcgcagtgctgcgcgtgtctgcgttatcccaatgcaggactatatgggactggacaacagattccgaatgaataaaccatctacagttggtacgaactggaagtggagaatcaagaagagagatcttacaaagaaactccagaaggaaatatatgatgtgacacttcgttacggacgtaagaactgggattaaatacataatgaaataattggaataatgacagcgtttcggatataaataatatttggaacgctgttttttttaaccgaatcaagcagttatttggttaaaaaagcaacgaaggggatggttttgtctgctttgtttcattcagccagagtgatttgtcagagggagaaaaaaaggacagtttcgcaaggtctttatttttgtatgaaaaagaaaacattgaaattgttttgacaggcgtacaattgaaaaagaaatgcattgattttcaggcaatgtctgataaaatattaaccagaaaaagcaaaagaacagattttcaggagggaaaataaatgaactataacagattagaaaccagtctgatcgatgtgatcaaagaggaacaggcgaagcttggatatatgaaagagaagatcagcctttattatccgctcagttccctgaatcatttctttggcggtgagacagatgctgcaggcatgatggagattttaaaagattttccttcttatatagaagagaaatttggtgaagtagcagtatcacacagaggagatcgtttctgcttcactgtttcggaaaaagcttccgaatatgtacataataatatgaaagagaatgaattcatcaaggcattgatcgaactggtcggcagacatggatgtacgatagaggaaattaaagaactgttccattcttattcagataaaatcattactgaaccaatggataacgaggagtttgatgtgatgatccgctttggtgacggatcagatccttattattattgttttaaagatgaaggatgccatatcatttaccacagatttttgccggaagactatgcagattttggtttttgataagaatgggtgaaaaatttttcaactgccagatcggcaaaaatatatgtgacatttgcaataaaagtatgttatttttttgtcaaatatcaacaaaaataagtcgaaattctatattgacagatagtctcaataatggtaatttttatttgacttaatgttttcatttatagaaacaggtaacattttattacattattttacaggaatatagataaacttgaattgactgttggagggaaagattaaatgagaaaaaccaaaattatctgtacaatgggaccgtctactgataagggcgatgttatggagcagcttgtgagagagggaatggacgtagcacgtttcaacttctcacatggacctcatgatgagcagagaggccgtatccagaaactgagagaacttcgcaagaaatatgacagacctgttgcagcacttcttgatacaaagggaccggagatcagacttggatgcttcaaggatggtaaggtttctctggaagaaggacagatttttacatttacaaataaagatattgaaggaactaatgagtgcgtaagcattacttataaagagctttataaggatgtgcggccgggtggacatattctggttgatgatggacttgtagacctggaggttcaggacatctcaggaaaggacattgtctgcaaggttattaatgcaggtgtgattggcgacaagaagggtgtcaatgttccgggtgcaaacctgaagatgccattcatcagtaaaaaagaccatgatgatcttctcttcggtatccaggaaggatttgatttcgttgcagcatcttttacacgtactgcaaacgatatccgcgaagtaagaaaaatcctgaaagaaaacggcggtgaagagattcagatcattgcaaagattgagaaccagcagggcgttgacaatatcgacgagattattgaagcagcagatggcatcatgatcgccagaggtgacatgggtgttgagatcccgccggaatatgtacctgttatccagcagaaaatcatccagaaagtttacacagcaggaaaaccggttattacagcaacacagatgcttgactccatgatctctcatccgagaccaacccgtgcagaggctacagacgttgccaatgcgatttttcagggaacaagtgcaactatgctttcaggagaaaccgcagccggtaaatatccggtacaggcacttcagatgatgagccgtattgcagaacatatggagcagaatattgattacaatacaatctttaagaaaacagacagaaatgagaatccggatattacaaatgcaatcgcacatgcaacctgtctgaccgcaatcgatctgaaggccagtgcaatccttgcagtgacaaaatctggaagtacagctcatatgatgtccaaacacagaccaggatgtctgatcggtgcatgtacaagctctgagagagtccttcgccagctgaatctgtcctggggtgtttacccgatgctgatcaaagaagaatacagttctgagatcctttgcctgagagcaatcgaagcagcacagaagcataaacttgtaaaagttggcgacactattgtatttgccggtggtgtaccgcttggaattccgggaagaacaaacctgatccgcgtctgcacggttgagtaagtcaggaaaatatcagtagttgaagtgggaaacttgcctgattcgataaaaaatcgtattttcagaaaatataagatgtaaaagacacaggggtctgccgtcagaaaagtatgacagaaaatattttctgacagcagtcccttgcttgtgttagaggagagaattgttatgaaaacaaatgaggaagaagattcgagacatattttcagaggagagctggcattggtgatagcagtcatgatcaacagtcttgctgttattctgatgctgtattctggttcaggaatatctgccatatccagtgttccttatgcatttgaaaaagtatttccggtaattacactgggaacatggacttatatttttcaggcacttctgatcttaagtctgatgatactgagaaaaaaatttgtacctgcttatctgtgcagttttctggttggatttgcattcagtgagtttttggatgttaatgaggcatggatcaatatcctgccaaagacaattccactcagagtgttatattttgtgatcagttatctgctgatctgtatagggatcgcactttctaacagatgcggtctgccgattattcctacagatctgtttcctcgtgaactgtcagagattataaaggtgaaatattctaagatcaaggtttcttttgatgtgatctgtctgatgattactgcctgtatgacagggctgatcctggggcatatcaacggactgggaatcggaacagtgatggcggcatttaccatgggaaaagtaattggattgattggtgatgagatggataagcacttccggtttgtgaatttcactcagcactgttcacttcatgtacagtaacagagtttcttcattgcaggatttttctttctatgatatacttgacgcattatagaagtaaagatatcataagaaatctgtgatggaagtatgttgcaactctggtatctgaaaataatatattaaggaatagtgatgcagattatgaaacggttgctcataaaaaacaaaagaaagctctggctttggtttctgctccttgtttttttgtttctggcatgcagagctgcttacattacaggcagcaaagcagaacagaccagaaataatgaagtagaagaaaggcaggcagatagtcggtcaataccgaatgaaatggagatattatgttgaatcaattttcaagaacagagcttcttctgggaaaagaagcaatgaataaactggagaactcccgcgtggcagtgtttggaatcggaggggttggaggatatgtatgtgaagcattggtcagaagcggtgtggggacctttgatctgatcgatgatgacaaagtatgcctgacgaatcttaacagacagattattgccaccaggaaaactgttggtcaatataaaacagaggtgatgcgggacaggatcctggacattaatccgaaagcagatgtgagaatccataactgtttttatcttccggagaatgctgctgatttcgattttagtgagtatgattatgtggtagatgctgtggacacagtgactgcgaagattgaactgatcatgcgtgcaaaggaggcagggactcctgttatcagcagtatgggtgccggaaataagctggatgccagtgcgtttcgggtggcggatatctataagacgaaggtgtgtccgctggcgaaggttatgcgtagagagctgaagaagcgtggtgtgaagaaactgaaggttgtttattcagaggaacagccgatcagaccaattgaagatatggcgatcagctgcaggtcgcattgtatttgtcctccaggtgctacgcataagtgtacggagcgcagagatattccggggagtgtggcctttgtgccgtctgtcgtcgggctgattattgcaggagaggttattaaagacctgactgcggagtacagaagataagaagtgtttattttgagatgtgtatggtgtcagaaatggtatggtacacatctttttttgcgggaaatattttgaattggattgatggattacctgttagagtgtatagaattgttatatgagaaaaagtcaaaataacataaaaatttataggattttcaaaatataatgaaagaaaaaagaaagaatctgtgatacactgtcattattgattgatagaactgtgaaggtgcagaatttggtgaatgagaatgcctgaacgatatcagcgtaataaattgttactgcttactccgttctcagtaactaataaatttcagattggaggatatcatattgaatgaaaacaaattacaacagaacagtgcaggcctgttttatcggatatgtggtgcaggctattgtaaacaattttgttcctctgctgtttctgacatttcagggcagttacgggatttcgctgcagaagatcacacttctggttacttttaatttcggaatccagttgctggtagatctggcatcgattggatttgtggacagaataggttatcgtgcatctatgatcctggcacatacaatggcggctgcaggtctgattttgctcacagtattgccggagtgcctgggagatccgtttgtgggacttctcattgcagttatgatctatgccatcggaggcggattgctggaggtgctggtaagtcctgtggtggaagcctgccctacagataataaggaaaaagcaatgagtctccttcattccttttactgttggggacatgtgggagtggtacttctttctacattattctttcgtattttcgggattgcaaactggaaatatatggcgctggtgtgggcattgattcccattgcaaatggaatcctttttaccagagttcccattgctccactgctggatgagggtgaaaaggggctgactatgggagagctttttaagaaaaaaatcttctgggttctgatgttaatgatgctctgtgcaggagccagtgagcaggcggtaagccagtgggcttctactctggctgagaaaagctttggaatcaataaaactatcggagatctggcaggtcccatggcgtttgcaattcttatgggaagctcaagggcattttatgggaaatttggagataaaatcaatctggaacgctttatgcaatacagtgcagttctgtgcatggtttcctatctgatgatcgcatttatcccggtacctgcgttgggaatccttggatgtgcggtttgcggtctgtctgtaggtattatgtggccgggaaccttcagcatggcggctgcctcagtaaagcgtggcggaacagccctgtttgccctccttgcccttgctggagatgtgggatgctcatccggaccaacctatgtggggatgatttcaggagcactgaatgataatctgaaacttggaatctttgcggcactgattttccctgtgttgatgataatggggattaagatgattggaagtctgcaaaaatatgattgagatatattaaaaagtatggaacgattaatttttcatattgatgtaaacagcgcatttctttcctgggagtcagccagaagagtaagccagaggctgccggatctcagggagattccctcctgtgtgggaggaaatccaaagaaacggacagagtacacacgctgttcccggacgaaataccggagaaaatgtggccacttcctgtccgtaacctgttatttctgggaaaagcctccgagcagaagcttctgaatcagggaatccgtactattggtgatctggcaagggaacgggaagcaaatgtacagctctggcttggagaaaaaccagagtacagatgaaaaatgaagacagacaggaagaataaaagcgcagagatgatactttttctctgcgcttttatagcggactgttatacatatttcaaaaattcttcatccgggatccgggaagtatgaatggcattctggatagcctgagccatgacttctgcggcgagagttccagccatgttgatatccacagaaacattgccaatgctggcagcatagatggaatcaccgtcagccatagttgctacaggattgatgcatctggcataggcacagcgggtcatagaggcaattttattcagttcagcctttgaaaatgccccattggtgattacagctccgatggtggtattgccggtaaactggtcatgaggtgtcataaagcggtataattcgtggacactgtccagaaacccgcttctgtcaggtgttttcagccctgcaattttctgaccattttgtggactgaagatatctcccagtgcattgacaacgacaattgcagccatctggaaatttttcacagatacagcggcaataccaagacctgacttcatggattgtttcataccgtaaagttttcccacagttgcaccggtacctgcaccgatatttccggttctggtatctgttcctgcaaatgcctgacggcaggcttcttcgcccatttttgcagttggacgtattttaggatctccgtaagagaggtcatagatacaggactggcatacaagaggaaccagggctgcaccggtgttataaccgatattttgtgattccagatagttcatcacaccgtcagcagcagccagtccataggcagaacctccggacaagacaatggcgttgatgggattgtcggcagtgacaggagaggtgagaggagtttctctggaagcagggccgcctccgcttatatcgcagcctgcttttgctccatttggaaaataaagaacagttacaccggtctttgcatcatggtcagaagtatgaccgatgcgtaaatttgaaagctctgtaatagaaatctcttttagtaatgacataaaaatctccttttgataaaaaaaacctgactacagtgacaatgtagtcagggatttttagtgaaccttccggaacagcagaattaaaaggctgttcttttaaagattatgcacgtttcagtgccacagaaagtgccttggaaacgatgcttcccactacaaagcagaagcccgcttcgatcagtccctgaacgcccacaaaagcagcaacgaagacaacaggattgcttactccaagactggaaacaataccctgaatgtaatctgtgttgtagaagaagagacataaaaagcccatgaagaagaaagtattcagtaatgggcatgccagtgaagcaacgtaatgggaaaatttcttcgccggtgatttatataatgctgcaaaaataagtcctgtgatccatccttccagtacacgtgccacgatacatacaataaaagtgccaaatggattaatgttaaaaagtgcggcagcgaaagctgaacttcctgtgacagccatatagaagctggttgcaccgaaagcaagtccgcatacagcaccacctttcggtccgaggatgatagctcctacagctaccgggatggtgagaagagtgatggataagccgggagtacgaagatagcccagcggggtaaaggacatgagcagaataatggcaatcatcatagccaactctaccatgtaaagagtgctgcttctttttgcggcagctgttgtagtagttgttgttgtgttcatatgaattctccttttggtctgataaaacggcgcaatgcgtcccctgcttttcagacagtttagagtatggggatcaggcgttatgaaaaatatacatcagaacaaaagatatgaaacaagaaatatcttccggtaaaagtttccggtgtgtagacgccttacaggtcgcctcacaaatttaaccagactgtgaagtggatgactttatccaccagactgtcagatgtggaaaacagatgcattttctttcgaataacgctctcgtaaacaataacacatttgattaaaaactgcaatattttatagtatgtttgaaaataaatacaggatatagagacgtttctatatcctgcaaaaaatattgattatgagatttagcgttccatcatgctgatggattcaattcccacacttccaccatgtaccacttcaattctgtggaattcttccttgatcagtttgacaactgcattattcttggtggctgtctggacaaattccagaagcaggctgtctttgccgtagtcaatgacttttgcctggaaggtttctgcaatctgaaacagttctgctttatcttccctggagcagttgaaaaccttgatgtagagaatttctttcattctgacaaatacatctgtgaagtcgattaccttgataacctcgatcatgcggtttaactattttttgatctgttcaaaggtttcatcatcgctgactgttgcgatagtcattcgggatactgtaggatcctcggtggttcctacagtaagactgatctatcacgagatatgtaaatggttaagtgagttttgttaattaaaatgtactaaaatgtcgtcttttttgacaagaaattatagaaaataaacaaaataacacaatgcaaaaaacaatgcataaaataaaagaatgtccctttgaggaacattcttttaacgtgtctgaaggaaaacttttaatttgggaagctggttgttaaggataagagtttccggaaacatgagctggtgaacgaattcttcggcataggtgaaatctccaacatgttcttttccgtggctgtcgctggacaaaataacaggaagctgatatttctgacagagatacaggattctggctgcattggctcttgtgtctccccgatatcctccgggtgcgagggaagcttcgtttatttcaaaaataacattttcccgtaaagctgctcttgccagcgtttcataatctacagggaaatgtgtatcgtcgcagtggccgagtatttttacagcaggatgttttattgcattgatgtaagcttctgtattctgagatacagagcctgaacggtagttctgccgatgcatactgatgatagcgtaatccaggttgttcagcagttcatctgacagatctgtatgtcctgcactgtccaggatgtttagttcaactccgtaaagaatatctatgccgaatctttttctgggataaaaaggaaggcttctgaaataagaagaagttccggaagccagagttcccgggccgtggtcagaaatcccaaggagtttcagtccttttttgctggctgcttttgccatgtcagagatggtacaggtggttccgtgaccgctggcgatagaatgtgtgtggatgtcagaaagatacattgtttgtctcctttccagagcggtttctatatatgataagagccttacggaagatgcaaagctgctgtttgatggtacattcgttatattcaagtatgacagatgaggatttaaatgtcaatgaggaaacaaaataaaaacaactgaaatacaacaaaaatcaaataaaaagcaacacaaataaacggctgatacatgttaaattatgttgacttcgggaaaatgagaaggtataatggaactatatgaaaacacgggggcttattgctgatcaatgacagcgatagcactgtttgcttatgtgtagacagttacttcatgagaaaggagtaacatggaaaaatttcaaacatcagacattcccggaattctcttatgaatggctggaggctgaactggatactggtatgattccacaaatatggacagcgaagaaattgctcctaacctttatgactaatcgataagtatatatcgagaggaaatgaatcctcagaattaagtaaaaaaagttaccgggaacaatgtgaccggtagcgaaatacagacgccgcactgccgtatggcaagtgcggcgttgttgttcaaaactctgatagcagagtgaaatcaaacaaatataaatacagtaacagctcagacaagatgatgtaaataaagacacttttttggacaaacgaggttcttaccctggagagcagatcagggtaaaatgaaatcatcagatatgaagagcgcaattcatatattggaggaagaacagtgaaaagtacggaacgattaatttttcatattgatgtcaacagtgcatttctttcctgggaatcagccagaagggtgagccaggggctaccggatctcagagaaattccttcctgtgtaggaggagatccaaagaaacggacaggtatcgtggttgccaaatctatccctgcaaaaaaatacgggatccagaccggcgagccagtagccatggctcttcggaaatgtcccaatctggtgatcgttcccagtgattttgaattatacgataaatgttcccgggcatttaaagcaatctgtgcttcctttgcacctgtgatggaatctttttccattgatgaggtatttctggatatgacaggtacttctctgatctatcctgaccctgtagctgctgctcatgagctgaaaggcaagattcacagagagctgggatttacagtaaatgtaggaatttctaccaataagcttttggcaaagatggcatcagattttcaaaagccggacagagtacacactctgttcccggatgaaatcccggagaaaatgtggcctcttcctatccgtaatctgctgtttctgggaaaagcttccgagcagaagcttctgaatcagggaatccgtactatcggtgatctggcaagagaaagagcatccaatgtgcagtactggcttggggaaaaaacgggacatcagctatggcaatatgccagaggtatcgatgattcccctgtaaaagcagtgcctgatgaggcaaaaggtttcagcgtggaaactacttttaacgatgatattacttccatagagcaggtgtttcccatacttttggagcagtgtgatgttctggcaaccagaatgcgcagaaaagataagaaatgcaactgtatttccgtgactttccgtactttggatttcagaaaccgttcacaccagacaaagctggaaaatgctacagatcttacagatgaaatttatataaatgctacaagactttttaaagaattctggaaaggacagccgctacgtctgattggtgtggcactgacaggccttacagatggcacttatgaacagatgtctctgtttgaagatacagaaaataaagaacgccacagaaagctggatgcagctatggatgagatccggatgaaatttggaaatgataaaatcacccgtgccagtattatgaacagcaatgcacggattgggcgaaaagcgaaagcacagatgaaaaacgaaaagacggaagaaccgtaagtaaagagaggactgagcattaagaacaatgcgacaatcctccctttataaaaatttcagaaaaagttttatcgttccatcatactgatagattcgattcctacacttcctccacgtaccacttcaattctgtgaaattcttccttgatcagtttcactactgcgtcattcttggttgctgtctggacaaattccaggagcaggctgtctttgccatagtcaatgacctttgccttgaaggtttcggcaatctgaaacagttcaaccttatcttctttggaacagttaaaaaccttaatatacagaatctctttcatgcggacaaatacgtctgtgaaatcaataaccttaataacctcgatcatacggttcaactgttttttgatctgctcaaaagtttcatcatcactgacagttgcgatcgtcattcgagatactgtggggtcctcggtggttcctacagtaagactgtccagattgtagctttttccggagaaaagtccggagattttggacagaacacctacctggttctcaacatagagagaaatccatctttttttcattcctttatccataataattttcctcctgatcaacagtccataatcatatcttccagagttccgcctggtttgatcataggataaaccatttcctcagggtcaatgatgaattcaattactgtaggtgcctttgtgttcttttttgcttcctcgaaggctgctgcaatttcctctttttttgtgacacggattccttttgccctgtagctctctgcaagtctgatgaaatccggtgtgtactgtggatattccatgccttcagtgcggcgggaaagtgctcctgcgcgcagattggtcatagcatagcgtttgccgtagaaaagcttctgccactggcgtaccattccaagatactcattgttaaagatacacaggataaccggaagctcctccagaactgcagttgcaagctcctgaatgttcatctgcacaccgccgtcaccggagataacgatgacaggtctgtcgggatttccgattttggctccgatgccgcctggaagaccatagcccattgttcccagaccaccggacatgatcatctgtttgccctctgtgatttccgcatactgggagacaagcatctgatgctgtcctacatctgttacgataatactgttctcaaattgttcgttgatctctttcaggatatccatcggacttaaaagatcatttggacgcattttaagcggatgctcttctttccagtttttgatcaggttaagccacttgtccgttgaacattcctggacgtattcgttcattttggtgatagcctcttttgcatcagcaacaatggggatatctacctgaatgtttcgggaaatggatgctgtatcaatatcaatgtggataatctgggcatgtggtgcaaattcatgaagttttccggtgattctgtcattgaatctggttccgatggagaacagcacatcgcagttgctgactgccatatttgctgcataggcaccatgcatgccaaggtttccgatatagagtggatggtctgtggggatagagccttttcccattacggttgtgacaaccggtacttttgtcttttccactacttcccggaaaatttcatgggcgcgggagattactacaccgccgcctgccaggaataagggacgttttgctttatttaaaagtttgatggcacgtttgagctggccgatgtggacatctgtgttgggcttgtatccgcggatatttacatttttaggatattcagcgctgccgagttctgccattacgtcctttggaaggtcgataaggacaggtcccggacggccggtgcgggcaatgtagaaggcttctttgatgatacgtcccaggtcttcacgtctgcggacagtaacgccgtatttggtgatgcttctggtgattcctacgatgtctacttcctgaaatgcatcgttgccgatgaggtggcgggctacctggccggtgaagcatacaagaggtacgctgtcatagttggcggttgcaagtcctgttacaaggttggttgctccgggaccgctggttaccagacatacgccgactttgccggtggttctggcgtaggcgtcggcttcgtggacaagggcctgttcgtgacgggggaggatgattttgacatcgtcctgtttgtagagttcatcactgatgtcgatggtacaggctccggggtagccgaagaggtattctacgccttcttcttttaaggctttgactaagagtttgttgccggatatttgtttcatattttggtaaacctcctttgtgtatgtgtataggacgctcagaaatttatttgtttggtgtgcggtttcggagcctagtagatctaagtgtctgaaaatctgctaaaagcgttcagaaaaatctcaaactcgctgcgctcagacagtgagatttttctgaacaacgcagatttccaggcactaagatctacacgactcctgcaaatgcacaccaaacaaataaatttctgagctgtgtattggctgatacaggggcagaatggcgctgcgctgattctgctgagaacgctgtaaagcagctcccacaattctgaatatagtaaaaaacgccctgggcttgtttgcccagggcgaaaatgtttccgcggtaccacctgtattcagagtctggctctgcactttgtcagtactgatatactgtgttcctgtaacgtggaactgacgttgaagcctacttggcatgtctgtctggatctatggatcatcagactggatatgcggtttggttcactgctcgggggctacttccacaattcgttcacgaaagctcgcaccgactgctttctctctgtgcttcccggggttgtgtactcctccctgtcatggcatttggctgatatagggatattcattgtccgaatagggtggacaaatgttttcttgggttacattatacatttatagagaggaaattgtcaaccgggttttggataattgctgtaaaatttatgttcctgaatgaattttggctacgttactgagaacggagtgaacagtaatgtaattgacagatttctatattgctgatataaaaaataaataatacagatgtttggaaggttattaacagttaaatataaattataaaatcatataagcacatgttgagttttgcaagatattagagtagaatattattgaaaggagttgattctttgagtaaatattattctatacatgaattttcaaaaattataggcgtatctgcccagacattacgaaattgggatgccaatggaaaacttcatccgcatcatactacagtaagtggctatagatattattctgatgagcaactcaaccaggtaataaatgtaaagcctaaaaaccgcattacaattggatattgtcgtgtttccagtcataaacagaaagatgatctggaacgacagattgataatgttaaaacatatcttctggcaaaaggacagccgtttgagataataagtgatatcggtcccggaattaattataagaaaaaagggctccaggaattgatcaggcgaatatctcaaaatcaggttgaaaaggttgttgttttgtataaagatcggttactgcgatttggttttgagttgatagaatatatcgcttcactttataattgtgagattgagattattgataatactgaaaagtccgaacagcaggaacttgttgaagatctggttcagataatcactgtattcagttgcaaattacaaggaaaacgagcaaacaaagctaagaaacttatccgggaattgatacaggaggaagcagatggtaaaagccataaaagtaatgttgataccaaataacgtgcagaaaactaagttgtttcagtacgccggtgcttcaagatttgcctataactgggctttggcaagggaaatagaaaactatgaaaaaggcggaaaattcatttcagatgcagaactcagaaaagaatttacaaagcttagacactctgatgaatatacatggttattgaatatttcaaataatgtaacaaaacaggcgatcaaagatgcctgtactgcttataagaactttttcaggggtttgcagaaattcccgagattcaagtcaaaaaagaggtcaatgccgaagttctatcaggacaacgttaagatacgattcagtaatacccatgttaaatttgaaggcttttcctccagcaggaaagccaacaaacaaaaaatgaattgggtaagacttgcagaacatggacgaattccgacaaatgctaaatatatgaatccgcgaatatcctttgacggattgaactggtggatcagtgtatgtgtagaatttcctgactgcagggaaatacttaatgatgacggagtcggtatagacttgggaatcaaagaactggctgtctgctctgatggaactaagtataagaacatcaataagagtcagaaaataaagaaatcagaaaaacagaaacgcagattacagcgtagtatctctcgttcttacgagaaaaataaaaaaggagaaagttactgtaaaacaaataatgtaatcaaaaaggaaaaacttttattaaaacgaaatcacagattaacaaatatccgtaaaaactatttgaatcagaccatatctgagatcataaatcgaaaaccaagatttatatgtattgaagatctgaatgtcagcggaatgatgaaaaacagacatttatccaaagcagtccaggaacagggatttttttggtttagaaaacagcttgaatataagtgcagcgataaagggatccagcttattgtggctgatcggttttatccatcatcaaagctttgcagctgttgtgggaatatcaaaaaagatttgaagttatctgacagagtttatagatgtgagtgtgggaatatgattgacagagatttccaggcatctataaatctcaagacttatggagaacaatttgcaagctgacactgaaacgttaatgcaaatatgtacggatacgttagtccggaatttacgcctatggagagtacaggaacttgtgagtagattgatatttatatcatcaaaagcatactcgttgaagtaggaatggaacatagaagtttataactttttataagttttcagtaacggctaacgaggcaatgatcaaaatggcccgtaaatatggtattgaaaagtatggtccaaaccgttatcatatcgtaactgcaaagatgggattccatggaagaacctttggtgccatgtctgcaacaggtcagccgggtaatggatgccaggttggattcggacctatgacttatggtttctcctatgcaccgtacaatgaccttcaggctttcaaggatgcatgcacagagaacacaattgccattatggttgagcctgtacagggcgagggtggcgtacatcctgcaacaatggaattcatgcagggacttcgtaaattctgtgatgagaacgatatgcttcttctgattgatgaagtacagacaggatggtgcagaacaggtgctgttatgtcctatatgaattatggtatcaaaccggatatcgtatctatggcaaaggctctgggcggtggaatgccgatcggtgccatctgtgcaacagcagaggttgcaaaagctttcacagcaggttcccatggaactacattcggcggacatccggtaagctgtgcagctgcactggctgaggtgaatgagcttctggacagagatttggctggaaatgcaaagaaggttggcgattactttgcagctaagcttgagaagcttcctcatgtaaaagaagtaagacatcagggacttctggtaggtgtggaatttgatgatactatcggcggagtggatgtaaaacatggttgtcttgacagacatcttctgatcacagctatcggagcgcatatcatccgtatgatcccaccgcttattgttacagaagaagagtgtgacaaagctgtagcaatcatcgaagatacaattaaatctctggaaaaataaaaatccggcaacggagtgatacagtaaggacaagggcgtcacgaattatattcgtgcgcccttttatgatatcagaatctgataaaaatttgagtgtgagagggaagagcatgaaacatctggtaattacgattggctgcgaatatggagccaagggcaatgccatcggtaagaagattgcacaggatctggggattaagttttatgatcgtgatcttgtggatgagattatcaaagaggtaggcatccctacagacattatggacagagtagaggaaggcggaaccatcgcaggtaaaggtgcacagggtgatgtgagaggttccttttccaaatatgcggatctgacagaccgcgccattcatgtacagaagcagattatccggaagctggctcagaaagaagcctgcgtgatcataggacggtctgcagattatattctgaaaaatacagaaggaattcagctggtgagagcatttatttatgcacctaatgatgttcgcgttcataacattatggaaagccataatctttcggaaaaggatgcaaagcttctgctggatgagaaggataaacgttatcataagagacatctggcactgacaggaagtaaccgcggtgacagacataacagggatattcttattaacagtgattttctgggaattcagggaacagcagaatatctggaagacctgatcgcaaaaaaatacggaaaaaaggaggcctgacctatggaacagaaaacatctgaatttgacaaagtacttggtgcatgggacatacttgtaattgcatttggcgccatgatcggctggggctgggtagtttcttccggtaactggattgaatccggtggtgtgcttggtgcagctattgcatttgcaatcggtggaatcatgatcttctttgtaggcctgacctatgcagagcttacagcggccatgcctcagtgtggtggtgagcatgtattcagctacagggcaatgggctccacaggttcttttatctgtacctgggcgattattcttggatatgtaagtgttgcctgctttgaggcatgtgcatttcccacaatcatcacttatctgtggccggggttcctgaaaggatatctctatacagttgcaggctttgatgtttatgcatcctggttgatcgtggcgattgtgattgcttttcttattatgataattaacattaatggagcaaagactgcggcagttctgcagactgttcttacctgtattatcggcggtgccggaattattctgatcgtagcttctgtggttacaggaagtgtggataatcttcagggacagatgtttgttggaaacggtactggcgaagcaatgaaaagtattattaaggttgcagttatcactccgtttttctttattggttttgacgttatcccacaggcagcagaggaaatcaatgttccgctgaaaaaaatcggtaaaatgatgatcctctctgttgtgctggctgttgtattttacgcactggttattcttgcagtaggttatattctgaatccggcagagattattgagtctcagcagggaacaggacttgtaacagcagatgccatggccaaggctttcgggacaaagattatggccaaggttatcattgtaggtggaatgtgtggtattattacatcatggaactccttcctccttggcggttcccgtgccatgtactctatggcagaatcctatatgattcctccgttttttgcaaagcttcatccgaagcacaaaactccggttaattctctgtatctgatcggtgccctgactatgctggctccttttgcaggaagaacaatgatggtctggatctgtgatgcaggtaacttcggatgctgccttgcatactgtatggtctctgtctctttcctgatccttcgtaaaaaggaaccggatatggcaagaccttacaaagtaggccactacaaatttgtaggttttatggcagtagtcatgtcagggctgatgcttctggtttattgtattccgggttccggtggaagtctggtatttcaggaatggtttatggtaggtggctggagtttacttggagttgtatttcatgcgatctgtaaacgtaaatataaagaagactttggtaaacttattgaactgatctctgatgaggatgcagcaagtcttatgccggaggctgatgatgaagagcttgatgtggtaatcgatgcggctattgacagggtgctttcctctatggcataacgctataaatgacatgacgattattttgggtaacagagttttgaatttgtgcagggtagatgccctgcgcattgcaatattgaaaaaatacaggaaaagaggcagaaattaatgaatccatttgaattttttattcctcagaatattacagtcggtgcaggtactctggcgaagcttccggaatgtgccaaaaagcttggaggttctcatgcaatgctgatctcaggaccaactctccggaaaatgggagttgtggataaggcggcggattatctgaaagacgccggaatggcagtggatatttttacagatgtagaagccaatccgtctgtcaccacagtggaaaaagcgacagaagcgtataaggattccggcgcagattttatcgttgcgctgggcggtggttctcctatggatgtggcaaaagcagtgggagttacggctaaatatggcggcagtattacagaatatgagggggcacataaggttcccggaaaaattgttccgctgatcgcaatcccgactactgcgggaaccggttcagaggttacggcattttctgttatcactgaccacagcagagattataagctgacggtattcagttatgaacttcttcctgcatatgcgattctggatcctgaacttctcacatctgctccggcatctgtggcagcagcctgcggaatcgatgcatttattcatgcggaggaggcttatgtttccacagcagcatctcctttttctgacgcaatggcagagaaagcaatggagctgatcggtggaaatatccgccgttttgtggcaagacgtacagatctggaggctgcagaggcaatgcttacgggatctctttttgcaggaatcgccttttcctttgcaagacttggaaatgtccatgctatgagtcatccggtaagtgctttctttaatgtggcacatggagtggcaaatgcagttcttctccctgtgattgcagaatataatgcgctggcagatcatggcagatatctgaagatttataattatatcagtccgatccctgcatatgaggatgaattcgaaccactgatgctggtggatgccatccgggaattaaacgaagatatcggaatcccggaagacctgaccacagccatccgccaggcaaagaaggtagaagagatttctgatgaggagattgaaagcaggattgatgccatggcagatgacgccatgaagagcggaaatattgcagtaaatccaagatcctccaggaaacaggatattgtggaattgtatcataaggctttataaattcagataaagaggaatgcagcattttatgtaattgctacaggttaacagaaggtattgattaaaatatctgctattataaaaaacgtgcagaaacattgaagtcgacagataacttcaggcttgaaggtttatctcgatttcaaaatgtatctgcacgttatttttttgagaaatttccattgtataacttgcctgatagaaagaaagattatatagtattaatcaaaatatagtaaagtaatgtgagtcaaaatattgattgttcaggaggattttatggcaaagaagaaaatatatgcagtacgcaagggacataaaacaggactttttgctacatgggcggagtgccagaaggcagtaagcggatattcaggagctgagtttcggggatttacagagaaagaggaggcattggcttttctgaacatggagacaacaggaaatgtatccgatgataaagcaaaagaggcggcaggaatcgtggaagtacctgaaaatatggtcattgcttatgtagatggaagtttcgagaaaagtattggcagatatgcctttggttgtgtgatccttacaccggacggacaggaaatccgtaaatccggcagcggcagtgattctgcaggagtcgcgatccgaaatgtggcaggagagatgcttggttccatgactgcagtaaactgggccatagaaaacaaatatccagctgtggaaatccgctatgattacgaaggtgtagagaagtgggtaacaggtgtgtggagagccaaaacacctctgaccagcaaatatgctgctcatatgcaggaagcaggaaagaaagtaaagatttctttttgtaaaatagcagctcatacgggcaatcactacaatgaagaggcagatcagctggctaagagtgcattgcttaagacagatgaagaagtacgaatataaaagttcatattaaagaaagtaagtatctgaaaagtagaaaaatatgtgataaaaacacctgcttgttgatagctgataaaatatatcagcatcaatagcaggtgttttagggataagattgaataattgtgaatctgccatctgatgagaatacaaattcatcttaacagagttatttcaagtgttttatcctgttttcactggtattggaccacatagtatattgtttacaatttctaaaatgtttatcacagtaagaattgaaagaagcctggcttacatttttcatatgctgttcatctttaccggtttgaaaaccagcaacagaacagtatgcccttgatgtgctgacaagtttagaaccggacaaagtccataatgcagaaccggaaccacctactccgctggtccaccagcttatatgtattccattgtagtgagtgttatactgtaaaatttgataattcatcccttttccggaacactgaccggcatagattactttgccattttttatggtatatacagaataatctacaataactccacggttgcttgatacaatcagatcaggggttccatttctgtcaatatccattagatagaaacactttccgccagactggagcagaaccttttcatataaggctctttgatcttttattttaatctgacatttcagttttttagagccgattttggctgtaattgttgcggtacctgttttctttgcttttacttttccagaagaaacagatgcaactttactgtcagtgctggaccaggtaacttttttgtttgtcccgcttaccttgaggtgataaacaccaccaacattcattgttagtttagttttattcagttttacggaagctgcctgagcagtacgtggaatgattattagagaaataaccattaatactgcgataataaatgagaagtgtttttttaatagttttttcattgactttcctccgaacaatgagttttttgaagaaaattttttattttactgtcacttttagtttttgagtaattccattacattttatcgagacagtagctgttcctttttgtctggcagtgatttttcctttagtgtttactgttacgcatttagtatttgagcttttatatgtgattttacctgttggaactgcagaacaggagatggtatagctgcttccttttttcagtgttattgctttatttttcaggttgagaactggcttttttacagtaattttacaggaagcacttttatttcccagagttactgtgacataagcggttcctgcacctttggctgttacttttccagtggcgttgacctgaactacttttgtatttgaactgttccaggttggcgttgatgtactgccagagatgactgattttaatacagcagaatttttgcctttgacagtataaagagtaagttgctttttatttagtttgattgagtgatcttttacaggaacaaagttgagtccggcattatttgcagctatttctaccgggctgttcttaacaccgtagatggtatgaagtgcttctgcacctataaacacccggctatgcagattggtagttgcaggaatctgcaaggtttctaattgtgtagtgccatcaaaaacactggagccgatgtaggttacttctggaccgatgattagtttttttaagtttgtacagtttgcgaaagtaaatccttctataactttgccgtgatactcggcttcttccagatttttacaattcaggaagacactttgttcctcatgtgttacagaagggggaacaataatatggacaagtcctgtatccttaaaggaagcacttttcaggaatacaagggttgagggaaaatcaatatgtcttagagctttgcaaccttcaaaggcactgtaactgattgtttgtgttccgaggggcagagttacatcttttaaattggtacagtttttgaacgatgcagagccaacataggtaaaacccttatggaagataacttctgatagtgacgtgcagtttgcaaaactgtattcgccaatttcttttactttaggtaaatccagatatgtcagagaagtgcatcctgcaaaagcactgtcttctataatttttatatttgaagaaatgtttaccttagtaaggttgtgacagcctgcgaatgtacgataataaattcggtcaagaccctctggataatgaatagacttaagattttcgcactgtgcaaatacactgattcccatggatgtgatcgtatcaggcaatattacagaacacaggtttttgttattagcaaatgcagaggattcaattttaacaacaggttttccatttaagatagaggggactgtaagatctgtatcagacccaacatagcttataattgttgcttttccaagggagagtgtgtatttatagccatcctcataataatagttggcggcttttgctgatacacagctaaaaagacaaaggatgaaagcaaatagcagaacaagatgtttaaaccctgtatttttatttttcatagatgcctcctgtaaaatttaatcgaatcaatgaatttatctgctttaattatgaaaagtaataaacagtgagtagatgtttaatcgcaagttggtgcacaggcatatgtaaagcctgttacaatgttattttttatagtcagggtgatgcttgcagcatttccccaccagaatacagtcggattgttaaagcttcttaggccatttttattaagaatagcagtagctttggaaagtgtcattccaagctgcattccaccgatacctacaccgtaatttccgcgattgcaaatatagacatatttctgattcttggaatattttgcattataatttacaccaatgatcatcttgtttccggcagcatagaaagatggataaccagaattgctttttttatgcattccacctattttgttgataatagtagaatattttccgacatatgatgggcttaaaggcggaagatttttcataaggttaagtactttgaccgttgttccgctatatctggaaaagttactgtaaatagtttttccatttacggttttataagcacgtactttgtaatagtaatgtcctgcagaaagttttttgtttgcatagctggtagtattttttgtttttatggttttgattttactataatttccttttgcagaattggcacgccagatttcatacccggatgcattagaaactttagaccatttaatggaaacacttgctttttttgaagcagtaactttgatatttgcaggtgctttaatagcagcggcctgtatctgagtgcatgcaagaagcatcaacagaatacttgtgattacgagaaaccatttctttttcttcatattagttttcctcctgagaaaataattttgtgaataatatttcacaagtttgttttatcatagcataaaaaattaaaaagagtgtattaggcgtagaaattagacggaaaattcagagaattttgtctaacttttgtgcctaatcaatctcgaaagcagaaatatagtaaaatatgttataaatcatttgaacatggaggaaaaaacatgagcgcaaagttagtattaacagtaaaggattcaagcagaatggcaaaggattattctatgagtatgatggataaaatgtttcatccgttaaaacataataaaatcttgaattcaaaggctaaaattggcatattaattgatgatgaggaagaaggaactttatatgaagcttccaagactccttatgaaatcaatctgcaaccaggtttccaccgcattactatgatagatccggcgaaggagaataaaaaaggcaatgttaatttaataggatcaataataggagttgttgaagggaatgggatcgcagataccatggcaaccagtagatttgcaaaatcaatggcaggagcaatgtttaaaaccggagatggatatctggatctgaatttaaaggatggggatattatcaaggttcaatgtcaggccggaattggcgggaaagtttcaataaagatattaaaatagaaaacgtagagggaaaatgatatggaatttcctatttatactccgtgggaaaatcttgatgcccaaacaatacaaaaagtaataaattcaggaattaattacagaacttattgtgacgaaaagccatgggatgtttcttttgagatagattttttgccaaaagaagagcttataatagttgttctgattgaacatggacgtcgtaaaggtggagttagtgtacagaaaacaagtgaacgaacagaaatttcgccgtatagtaaagaagagcaggcagaaatgctaaaagcttataatgagaaaattgacagatatgaaacgtggaatgcattgttcacaggacctacgacaggattgtttggaaataatgtgtatgaatcatacatggattacatgtattcctgggaacactggagtgacagaatatttttgtcagattattatgaagaacaattatattcggtgcagtcagatacctatgttactgtaaagagcactcaggaaggatatgattgtatctatgaactggcacaagtgaaggtgaaagagcatattttggaaggcatatgctggaagtcatttcccaagctgatattttccagaggagataaatcagacgctccgtataaagatgtgtataatcgtctggaaatactgacaggagcagaatatttaattgtaccggcgctgattgaaataaaagaaaaatatgaaattacagcagtttcagaaaaattggactgtccgcagatgcggtttcgcggaatgactatggaagaaactgtaaaacaggctgtttttgaaaatatatttggagaatttttacagggaagtagattttgcagagaaaatacaaataagaaatgcctcattgcagaggaacagaaagaaatatttgcttccgagtttcttgaatctcagaaatatcctgaattattgatgaatgcagtaaaaaaagcagattttcattgtatggcttttaaagttcttggaattttgaatagcccatatatgcagacatatgataaaatagaaatgttaagaagctgtatggctattagtaatagtgcggaaaaatccagggaatggaagaatgcatatcaaaatctgatatgggttatgatcaaaaaactggaaatggatgattcacaggggaacaatctggaagttgtcagtgaattacagaaatttgtggaataccaacagggagattttgaaaaagaacagaagggaaaatccagagaagaaacagcagaaattttcttgatgaatgaactcataagaatgttggcatgtatttctattgtaacagtaaagaagattcagggacaggaatgtgcagaattggctgagaagagttggtttatggcagaaagtattgaatatatgtggaatgcagaaattttaaaccaacaagtgagagaaaatgtgcaaaaaacattcatcagaatctgcgtaggatgcggatctatgtatctgcaaaatgttcaggaagagaatgtaaaccctgaacagataatagaaacagcagaaaaagtgctgttgttattgaataatcatagagatttgatattgcaggaagaaatgccagtttatcagataccgatttatcagatgcttcaggtggcaaatataagactaaaccatgatgaaaatgcattatattatgcaagaaaaggtgttgaattgtgcgatgggattaacgctgataataatgcacagttaaacggaatgatcagagattcaaagcgaatgttccaggaatacataaatcagaatgcacagaaagtacctgagaaggcaaaaaagaaaggatttttttcaagattgttttcaaggtagcctgcaaaaagaaaatccaacaaaaagaaaatccaacaaaaagaaaatccccagacatgatgtcataaaataacatcatgtctggggattttgaatttgaaaagtaagcgcttatttttcaggtgtctttgaaaatatttattattaaagaatctgttgtagtctgataaacatagattacaacgttccgccatattccagaatcatatttctgataatttccaaagtttcctgttctgaccatgccatattacccttatcaaggaactgacagaattcataaagcttttgggaaaacccggattcttttaagacatagtattgcagaccacggctggtgttattccagaaagcaatgccattattgacattagaactggatacaatggaaatatgtctgggcagatggatgaaattttcctttacacagatacaggagtgtggtgtgttaagcatgtattgataataactttttagaagccacagacgtaaagacggatcaaatggtttgtaaagcatgtcaggataaccagctatacgtccttcttccatgaattgccttagacctgaaatacagaaaatatgtaccatgttttcgttttccatatgtcgggtacgttgagaaagagaaacaagtaatggttccttttcgactgtatccagtataatctgctgttcaagtatatttgctggaatcagatggagaaggcatggagaatattcaatgtaatagttgtgtgttacataaccttcgctcatcatagtgtttacatcttttacataagaatccagatcagaacgaaacagcatttttctggccagcactttttcgcggataaattcatgtttcaacaattgtagttgctgagtatctctgatgatgattccttttgatgtctggaaatttattccaagggcaatattatctgtgatcagccagtttggaagcagaccggattttttttcttcggatacagagggggtaatataataataaaaaggttcatagctttcacaaaacatagctggttttaagatggatatttttttcaggttatctaatgtattgtcggcattctgattctgcagcaaaggaaaaagatgttccagcctctgatatggtgcttcatgtatgatctgaatgagataatgtaaatgttctgaagaaatttctgaagtccataaataaatttctgaatctgatgtacttatcattatttttcgaatccaggagtaaatggcaaactcgttatccaggatagagattgtatttggggtgtctgatatgctgacagaggcagaaactgtcggaaattcaattacatcctgctggatgatatggatcagttcttccatacattgccactggctttttcccattttttcctgtcggtagagaagcagaagatcagattttgtgccggcggtacattccattgcgtcaagaagccgtaccagacggtcttcttctttgggaatgcgttttcctttattcattttggagatatagtctaattgcagaccactggcttcggcaagataacataatgttttgcctgtattttgtatttctttttcaagtctttgtgaaaaatcactcatagtaataacaaaatccttccttaaaatgtaacatatataagtataagcgagaaggatggaaaatgcaaagcttttatagaaattttgtctaatatcagtgcctaaaacagtaataagcgttatctgtgttattatcataactgcgaaaaaaaatattgtaagaaggagtaaaatgctatgtttttggttgctgtattggtgttattgttcttaatgtatcgtttttatacatttcgagcagaaatggtttttataatgacattgcttacacctgcgatgttactgataggagcatatcatctgacaggagaatatcgtgaagcaggaatatttcttttgatagttggaatctttttgttggcagtagttatgtttatgtatcgaattacagcaaggggtgtagaaaaggaattcagatctgcttattataagaatctgtttatttatggtgcactcagatttcttcagacattttgcagaatgacgattgttttttcatttgtagccgctatgcttggcggtgtatcacttgattataaggaacggctggatatagcaggaagaaaaatttatgtggatgataatctgcgcgatgcagaaggaaatcaatatacagaagtagaaagataaaagaaaataaagattattttaaagaattattataaaaacagctgcgatactgtctgaaaagtatgctcagggataaaactgtgagcagtacgtcagatgacaggtagtgcagctgttttctgttatggaaacagaatttttatagaaggtaatggataaaacgaagattatgacagtgtcatatctccatctttcacccacccaagcttacggataaacatattgatgagcggacacagaattgcagggaggatgaaggagatcatcaggagacctgcccagtcccagcctgtaactgaggttttaagtccatctgcaatatcattcatccagccggtatatacaccaatctgtcctacgaatccgcaggtacccataccggaagaaacaggagtaccgttcatctgaagtttgaacagacaggttgcaagaggtccggtgatggctgaagtaaggatcggtgcaatccagatgcgtggattttttacgatatttcccatctggagcatggatgttccgattccctgagaaacaagtccgccccatttgttttcacggaaggacattactgcgaaacctaccatctgtgcgcagcatcctgctacagcagctcctccggcaagtccggtaaggccaagcgcagcacagattgcggcagatgagataggaagtgtcagtgcaatacccacaaatacagaaacaaggattcccatcaggaacggctgcaggttggttgcccacataataatatttcccactttcattgctgcacttccaagtgccggagcccaccatgcggacagggcaacacctacaccgatcgtgataagtggagtgaccagaatatcaattttggtttccttagatactgcttttccgatttcggaagcgaagatggctacaaataatacagccagcggtccgcctgcaccgcctaatgcgttagatgcaaagccaacagtgatcaatgaaaacaacaccaacggcggacaatgcagcgcatagccgatggcaacagccatggcaggaccactcattgcagatgccagagagcctacggtatactgggtgtcgtttacagttgccacagcagtggtcagaaatgaaatatgaaactgtgttccaagtgtgttgatgatcgtgccaatcagcagggagcagaaaagaccctgcgccatggcaccaagggcatcgattccataacgttttatggagatctcgatgtctttgcgcctgagaaatgctttaaacttttccatagattactttctcctgtttttattatgtatagaagggtgtatatacacctatatacgtttttctcattatagtcacattcacggagtaaatcaagtagttttgtaactgttcacacaccactatcccgcgaggtgttttggcatgaatatgccaaaatcacaagacatacaagccaaaattccattaccgcaggcaatctggaatgaattttgggtacgttattgtgaacggagtgaacaataacgtagtttaaaaatagtggaaaacaatttacagaaagaatattgtaaagtattttactgtctgatatgatagaaagggttaattttacggaggaaaaaaagatgagtgaatggatcagaaaaataaactggaagtatgtggtcgtaatgttgattggaaatataatccttggtttgggaattgcgatatttaaactttccggacttggaaatgaccctttcagcggaatggtaatggcactggcagaatgtgtgggaattgaatatgcccgttttttaattcttctgaatctgggattttttgtaatagaaattatctggggaagaaagcttatcggattgggaacgatcataaatgcgttattccttggatattttgttacatttttctataacttgatcacatctgtgatcgatgcaccggatcagatggcaatgcaggtggttaccgtatttattggagttatcataacaagccttggaatttctatgtaccagcttccgaaacagggagttgcaccatatgacagtatttctctgatcatgacagagaaatggccgaaaattccgtatttctggtgcagagtatctaatgatgcgatcagtgcactggtgtgttggcttgcagggggaatcgtcggactgggaacactggtcagtgcatttggattcggaccttttgttcagtttttcgatacacattttacatcaaaagtgctggcaaagctggaaaaataataaaaaactgtcctgtatatgcacattatacgtagaaaataggtgcattacagagacagtttttttatttgtcagcctgttaactgcatatatggcatgcttcacatgcagatggcgtagtagcgcatcctcccatagcagtttcacgcagttctgcaggaagctttttacccacggtaaacatcgtctggatcatttcgtccagaggaatcaactgcgggattcctgcgagagccatttctgcggcaattatagcgtttgccacacctgcagcatttctgttctgacatggatattctaccagaccgccgaccggatcgcataccagaccaagcatgttcataagaacagtagatgcagcaaaagtacattctttcggtgaacctcccatcagctctacagcagcagatgcagccattgcagatgcaacccctacctcggcctggcatccgcctaccgcacctgcaacagttgcatttcgcattgccagataaccaatggcacttgcgttaaataatgcctgtataatctcttcatcagagaattgataatgttcctgcattgccagcatcagccccggtacgattccggcagaaccggcagtaggagaggccacgatcagccccatggaggcattcgtttccagtgtagccatagcataagtaattgccttctgaagcagatttccgcagagaccttttttctcctgagcgtggagactcagctttctggcttcgccgccgatcagaccacccatagattttaccggctgtctgattggtgagaaagcagcatctttcataattcccagtactcgtgtcatttttttatttacaatctcagaggctgtttcgccaagctcaatctcacggatacgcataatctctgagataggaagatttttttcttcacagagtgctaagagttcatttgcatttttaaaatccatgataaaaatcctcctttctttacatctgtacgatcataacttcatgaatattcgggttctcgcgaatcgcaggaacgatattctcaggaagtttgccgtcagattctacgattgtataagcaatctctcccttgctttcacggaacagacgcataaatgcaatattgatattgcggtcactcaggcatttggtaatataggccacaacgccgggagtgtcctgatgaatcacgatcactgcactgtactcgcctgtaaagtctacctgtacgtgattgatatctacaatacggaccttgcctcctccaagggattcgccgcgtacggtcattttctggcctttttcattttccatgcagatatctacggtgttcggatgaatatctgtttcctgctcatttggagtgaaagagaatttcagacctttttcatgagcaatatcaaaagaatttcggatgcgcatatcatcagtagagaatcccataataccacccagcagagctcggtcagtaccgtgaccatggtaagtttttgcaaaagagccgtacaggatgaagtcggctctctttaacgggccttcgatcattttctgggcaagataggaaatacgcgccgcacctgcggtatgtgaacttgaaggaccgatcatgttcggccccataacatcaaatacactgataaatgacatattttttctcctatgaatatcaattatagtcttgcatgtttatggcaataatcttattatttgcaaatttctgattatattctatcatttaggaataaaagaagcaaacttatcgttaacattaacaaaaattaatgtaaaaaatgagaaaacagggttgctttttctctactgggcggttacaataactgtgcaaattgaaaataattttaaaaatgctgtttcaaaatagggaacagcataaaatttgctgttagaaatcagattcccgaaaacagggtctgatatccgaaatcgtaaattttaaagaaaaggcaggtggaacagaatggataattgcgattctcatgggcgaagtagtagcacaggatctgaattaaaaagagtatatgagtatagcagccgtttttgttctgctgtagtcatatattttcaggattttccatgtatgcatataaaatagaagttttttactgtctgtgatctgacagtttctgtatgtggaagatcggatgtctttttcatttcttatcctgtatttatgaaattcccccgaatcatgcaattacatattgagcagtaatgatccggcgaagatgccggacagttacggacagcggatgaatagcaggttatggtttgataccctgcggtttattgtgctggaaaaagcatggaagaaatggcagtaaaatgtaataaataacagactgctttcttttggtgtgcttttatgcaaaaaaaacggaggatgaaagaatggagaaaagagtacaggattattccaaagaaattctgaagatcatccgcagcaacacctctccggccgttatgggaggaaggctgcaggattatcatgagaatgatctggcagatgtaatgccgaaactgactgtacaggagcggtgcaagctgtaccgtatcctggatacagatatgctctctgatatttttgaatatacagatgaggagaatgcagcagagtatctgaatgaaatggatgtgaaaaaagcagcagccattttatccaaaatggagacagatgctcttgcagatgtattaaataaagttgaaaaaacaaagaaaaaaatactgatcgatctgcttgaacctgaggttcgacgtgatgtggagatgatcgcatcctttgatgaggatgagatcggaagccgcatgacaacaaattatattgtgatcacagataaactgacagttaagcaggcaatgagcagtctgatcgaacaggctgcaaaaaatgacaatatctccactatttttgtagtgacagagcagcagaaattttatggggccattaatctgaaagaactgattattgccagacgggatgatctgcttgagaatctggtggtgacttcctatccatatgtatatgcggaagagaatattgatgactgtatcgaagaactgaaagattattctgaggattctattccggttcttgacaacgataatcagcttctgggtgtcatcacatctgccagtatcattgacctggttgatgatgagatgggtgatgactatgcgaagctggccggtctgacagcagaagaggatttaaaggagccattgaaagaaagtatgaagaaacgtctgccctggctgatcattcttctgggacttggtatggtagtttcctcagtagtaggaatttttgagaaggtggtgactgcacttccgatcattatgtgcttccagtctttgatccttgatatggcaggtaatgtgggtacccagtctctggctgtgacgattcgtgtgctgatggatgaatctctgacaggtaagcagaaactggaacttgtgtggaaggaaatgagaattggtctgtgtaatggcggacttcttggaattctgtcttttgcgctgatcggattgtatatttatctgtttaaaggaaaaacacttttgttttcctatgcagtatccggatgtatcggtgtggcactgttgctggctatgttgatctccagtgcagtaggcacctgtattccattgttctttaagaagatcaatattgacccggcagtagcatcaggtccgctgatcacaacagtgaatgatcttgttgcagtaattacctattatggcctgagctggctgttcttattaaaaatgctgaatcttgcaggctgaatttcagataataaaaacagaaagagggataaaatctttatggatttaaaacaattacagtatttcgtagtatgtgcgcagactggttcattcagtgatgctgcgaaaaatctgtattctacacagcccagtgtcagcaaggtgatcaagggactggaagatacgctgggaatgcagctttttgaacggcttccaagaggaatcagactgacagtacaggggcacaagatttatgaatatgcgtcgaaaattataaatgaagtaaatgttctggaaaatatggcttccagcggaatgacaaaatggatccggatatctttaaaccccagttcctggtttgccaatcagtttgtagacttttataatgaaacctatgaaaaaaagtaccatttccaggtaacaacagcaggcgtacaaagcgtaatggaaagagtcagggattatatggatgacattggttttgtatatatcctcagtcagcagaaggaaaattttttgtatgaactgtcaaaaaacaaaatgcatttcgaacctatctatgaaacagatgtaatgctgtatccgggacggctgacagagctttacaattccggcaaagagaggacagaactggaagacctggagggaatccgttttatacagaattatcaggatgaattttttgacatcggtgctgtaaaagaagatgcattccaatggaaggatattgacatttccgtgctgaccaacagtgattatattatggaaaaaatgctgaagaacagtaaggtggcaaatataagcggaagttacctgtcagaaaacaaagaaggaactacaccgggaatccctctggatcttggagacagtaaagtgatttttggttttatactccacaaaggagaagaaatggatgagagtgtggcagagcttgtggagtttttaaagagcaggctgccgaagcattaattgccgaagcattaataaaaattgcagttgactttttaacttattttgcatatactaatagtagctaagaaatgaagtgaaatttccatgaagcgaaacgaaagccctcagagttgccgctctgagggctttcttgctcgttacggagagctgttccgtttagactgttgctgtctaatgtccgctgtccagccatttgcatatgtagtagctaactacgcctgctatgacagagacaagaaatgaagtaaaaattgcttccatgaaactcacctccttcctgctggaggttcgacagctcttgtagtataacatagtttagaacaaaatgggatggttgttttaaattattgctgatataaaaaaaacctattccaaaaatgacggtagatattcaaattaagaatagcttataacccccagggtgggttgtgggctatttttgcttttgttaaactgaacggtggcaaattaggagtacaattttcaaaaattataaaatggagataatcaaatgagaaaatatgcattcagacgactgcttcagctgattcccattttgtttgcgattacttttctctcttatggcatgatgcggattgcgggaagtgatgtagtaacacaaaaaatggaaaatacaggacagatcctgtcagaagataagttaaatgcagccagagaacagctgggactggacaaaccatttctgacccagtattttgtgtggcttgggaaattgcttcatggagatatgggaaacagctatgtatccagtcttccggtttttgatacgttcatatcgaagcttccggcaacgctgcttcttacagtgacatctattttgctgactatcatcatatcaatccctctggggattctgtcagcagtaaaacagaatacgatcacggattatctgatccgtttatgcagctttataggaaacagtcttcctaatttttttgtatcattgctgttaatgtattttcttgcgatccggttgcggatttttccggttatatccaaagatgtaagtttaaagagtgtggcaatgccggcgatcactctggcaattgccatgtcagccaagtatctccgccaggtccgtgcaactgtgctggatgaattaagcaaagactatgtggcaggagcgaaagcaagaggagtaaagttttctgtcactctttggaaaagtattatgaaggcttcgctggtaaccatcattaccttgctgatgctgtcagtgggaaatctgctgggaggaactgcaatcgtagaatcaatctttatgtgggatggagttggaaagatggcagtagatgccatctccatgcgtgattatcctattattcaggcctatgttatgtggatggcgatcatctatgttgtagtaaatctgcttacagatctgtcataccggttcctggatccgagaatccgtctgggaggtgtgaaacaatgagtgaaaagcagaataaaaatgtgacagtgcgtgtacagaagattaagaaaaaccatataaaacaaaagctgatcttttttcttattcttgcaatagggcttgtaatacttgcaattttttcagagcatctctgtccatatgacccttatgcacaggatctggcaagtgcacttcagccccccagtcttcagcatcctatgggaacagatacatatgggagagatatgctgtccagagtgataagtggtgcaagagccagtattttctctacctttatcctggttgctgtgatcgctgtgctgggaacagctgtgggtgtatgctgcggatattttggcggagctgcagatgctgttatgatgaggatttcagatgtatgtcttgctttccctgggcttgtatttgccatggcgatcgcggctattcttgggggaggcattcagaatgctgttatatcactggcagtagtaagctggccgaaatattcacgtattgccagagggcagactctggcattaaaagaggaaccctatattcatgctgccatacttgcaggtgacagctcaggtcagattatgctcaggcatattcttcccaatatgctgggacctgttctggtaacagccatgcttgatatcggtaccatgatgatggaacttgcaggtctgtcatttcttggactgggagcacagattcccatggctgagtggggaagtatgatgagcagcggacgaagtatgatccagacatatccatggttagtattatcacctggaattgcaatttttatatctgtggcaattttcaatctgttaggtgatacagtccgtgactatctggatccgaagaacagccgttcatgataagtaatatgaaaacaaacgaggaggaaagaaaatgagagcaaagaaatttctggcaatggcaattgccctgggactggcggtaggagcgacagctatgccaacactggcagcagacaaaaagacatttgtatttggtgataccacctttaatgcggaaaatgaagaggcagatattaatccacaaaatacatatgcaggatgggcgtgtatccgttatggagtaggggaaactcttttccgttattccgataccatggagatagagccatggatcgcaaaagagtatgaaaatattgacgagctgacctggaagatcacactgaatgacggagttgtgttctccaatggacgtgcctgtgacggagaggcagtaaaggaaagcctggaggctctggttgccaatcatgagcgtgcagcaggagatctctgcattgatactatcgaggctgacggaaatactgttaccataaagactacagaaccgaagcctgcactgatcaattatctcagtgatccttatggatgcattattgatatgcaggcaggtgtcagtgatgatgggatcgtgattggtacaggtccttatgtggcaactgaactggtgacagatgatcatgttaatcttgtaaagaatgaaaactactggaatggagatgtaaatgtggatgagatcactgtccgcacaatttctgacggtgatacactggcaatggctcttcaggcaggggagatcaatgctgcctatggtatggcatatgcaagctatcccttatttgaaaatgatgattttacatttaccagtacagctacaagccgtgcattctatgcatggatgaactttgaaagtcctgtaacatctgaccctgcagtgcgcaaagcaattgccatgggtattgataaggacagctttgtgtctgtgcttctgaatggatatggatatcctgcagtcggtgctttcccggatactttctcttttggcggacagaatctgacaacagagagctatgatcctgatggggcaaagaaggttctggaggaagctggatgggtggattccgatggtgacggtatccgtgaaaaagacggacagaaactggaaatccgctggcttacttatccaagccgtcaggagcttccgcttcttgcagagtctgcacaggcgatcttaaaagaaatcggtatggatgttcaggtgaattgtacctctgataataatactatccgtaaagatcctacattatgggatgtatatgcaagtgccatggtaactgcacctacaggagatccggagtatttcttcacttcctgtacactggatgaatctgcaagcaataacggacattatcacagtgataaactggaagatctggaaaaacagatgaagcaagaatttgatgcagataagcgttcagatctggcaatccagatgcagcagacaatcctggatgataatgcctatgtattctgttctcacctgagaatgagtatgatcatgcagtctaatgtaacaggactgactgcacatccatgtgattattatgaactgacagcagatctggatattaactaaacttgaacgatgatatttcaggggtaaaaggtattttgcgttactgctcacatatcactattccgcgaggtgttttggcatgaatatgccaaaatcccgagacatacaagccaaaattccattgccgcaggcaatctggaatgaattttggctacgttactgagaacggagtgggagtgaacagtaactattttgcccctgatttggtaaggattaacaaggatggtttacagatggatagaaaaatactgacctacgattccgtagagatatcatttggcggaaaagcggtggttcatgatgtgagtttctcccttgaacatggagaaatacttggtcttgtgggggaatcaggcagtggaaaaagcactctgatcaaagctgcaatgggacttctgggatcggatggtcttgtgacaagaggagatatccgatatatggatcagaatatcctggatataccggagaaagaaaaaagaaagatcagaggtgcaggaattggaatgatttttcaggatgcaggtgcctctctgtgtccgattcgcaccatcggagagcagatttacgaaagtatgtgtgcacatacaaagataacaagaagtgaggctaaaaccagggcaatggatctgtttgacaaactgaattttaaggatagccagcgcgtgtgggacagttatccatttgaactgtcaggcggaatgaatcagagagcaggtattgcaattgccatgcttatgaatccgcccatcctatttgcggatgaaccgaccagtgctttggatgtgtctgtacagcgtcaggttgtaagggaaatgcttaagttaagagagttgtttggaactgcaattgtgatcgtgacacatgatatcggggtagtccgggcaatggcagatactctgttggttttgaaaaatggcaaaacagtagaatatggcacagcagaccgtgtactggatcatccccgcgatccgtataccaggaaattgctggaggctgtaccaaagctgcaaaggaaggttagagtatgagcatacttttagaggcagaacatttaacaaaaatatttacccagagaggaaaaaatcctttgaaagcggtaaaggatgtaagctttacactaaaaaaaggagaaacgctgggaatcgtaggagaatccggcagcgggaaaagtaccatagcaaagctgctcacccggctgactgatatcacagagggcacactgaaatttgaaggaaaagatattacaagactgaagcaaagtcagctgaaagaggtatatggagatatacagatggtttttcagaatccggtgggttcttttgatcccagaaggacactgggtgacggaattggtgagagtcttagaaaccgtggaatgaaaaaggctgatgtggagaaaagagtagcagaattgcttgagcagtgcggccttgagaaggaatatgcaaaaagatatcctcatgaggtaagtggcggacagtgtcagcgggctgcgatagcaagagctctggcagtagaaccaaaagttctgatctgtgatgaggcaaccagtgctctggatgtaaccatacagaaacaaatcatggagcttctggaagacctgaaagagaagaatgggctgtcttttatttttatttgtcataatctggcccttgtccagatgttctgtgacagggttctggtactgtatgagggaaaagtagtggaaagcggaattcccgatgatatcatcaatgaacccaaggaagagtatacacagagactggtggatgcggtactttcgtgaatgtgattttttttgaagtgcgatagtggtatgaaaaatacaggcaaaactatgccggataagaatatatagatatccccttgggtgggttgttgacgctttaatgtggtgctacaatacagttgcttgtaaggtgcgcgccagataaaaataatattttcacaggaaaggaagtatatttatgcatatacctgaaaattatttaagcccgtcaacatgtgctgtaatgacagcagccatgcttccggtgtggggatattctattcataaaataaaaacagagataccgaaatcaaagatgccgcttcttggtattggggcagccttttcatttctgggaatgatgtttaatgttccgcttccgggcggtacaacaggacatgcagtagggggaactcttattgccatactgacaggaagtcctgcagccgggtgcatagcggtttctattgctctgctgatacaggcacttctttttggagatggcggaatccttgcatttggggcaaactgttttaatatggcatttatattgctatatctgggctttttcctgtataaacttcttttgaagaaaacaggtatgcgcaaacttagcgcggcaattggttcatatataggtattaatgctgcggccttttgtgcagctgttgaatttggtattcagccactgctgttcaaaaatgcagaaggccaggctctttattgtccgtatccgctaagtgtatcaatacctgcaatgatgatcggacatattacattatttggtctggcagagattattctgacagtagtggtacttacctttgttgaaaaagttacaccaaaagcattggatgctgttccggataagacagcatttaaaccactgtatatactgatggctgttctcatcgtactgactcctctgggacttctggcaaccggtactgcctggggtgaatggggtgctgatgaaatcgctggtctggtaagtggcggaagccagcttggatacactccgtcaggaatgaccaatggatttgaactgtcaactttgtttcctgattattctatgtccgggttacctgagtggacaggatatattctttcggctattgtaggcgtggcacttctggtgatcatttttaagattatttcttcaatgatgaaagagaaagttgattttaaaaagaaggctgcataacagatgaatgattataaaaaagaagaaactatgcttccagactggatgtgttccggagaaacttatgttccatctaaagataaagaagcatttttaacaaaaagtacgaaatcagttttatctgtgcttgcaaaaatgcggttttatgaagggaaggatggcaaattttctgccactccttctctgaaactgttttatacacttctatatattgttcttactgcatgttcgggaaattatctgtttactctgatcatgtgtgcagcagtgacagtcagactggcgtttttttcggcaaaagctatccgtcagatcctgagaggaacagcaggtgcggttctgttttctatattgatccttctcccatccgtatttatgggaactcctcagactttaatgaatattacttcaagagtatatgtatctgtaactctggttggtattttgtcatcagggacatcctggaataaactgacaggaagtatgagaacttttcggctgccatccatatttatttttacgctggatattactttgaaatatatttcggtgcttggagaaatgtgtgcggctattcttacgtctgtccagttaaggtcagtgggaaagaatcctcagaaagcaaaagctttgtcaggtgtgctgggaatctcatttttgaaatctggtgaaatggcggaagaaatgcatacagcaatgtgctgtcgtggatttacaggagagtataagaaaaagcagaaatacacgttatgtgcagcggatattttcagcacttttattatggccggatgtattgtattgttctggtatctgaacagaaagatgtgataattgacaggaaaagacagaagagggcagttatgatcagacttgagaatgtatgttttgcatatgaaaaagaaattgcactgagatatgtggatcttcacataaacagaggagattctatagttatccagggacctaacggatgtggaaaatcaacactgattaaactattgaatggaattatttttccatcggaaggaaaatatttttatcagggacatgaaattaatgaaaaagcgttaaaaaacagccagtttgcaaaatggtttcatcagcagatgggatacgtgtttcagaatgcagatacccagcttttctgtggaagtgtggaggaggaaattgcatttggcccggtccagatgggactttcggaagcggagattaaaaacagaacagaagactgcctgcacttatttggattggaaaaactaagagatagaccaccctatcatctgagtggaggagagaaaagaaaggtttcattggcatgtattctttcattgaatcctgaggttctgattttggatgaacctcttgcaggacttgatgaaaaaacacaggatatgctggtggagtttttgcagagttttcataatgcaggaaaaacgttgattacgatcacacataacagacagctggctgaaactattggtacaagatttgcctgtatgaatgaagaacatgaattgaagatgctatcataatattgataattatcttttcgttaaaaaaagtacttcctgcggacgaagtactttttttaatgagtttttagatgcgcattgcgcggaggtctgtgcacctttatttgttgtctgacacaaatctttgtgcggatacatgaatcattaagtatctcgctgactgatatttaatgatctctgcattgattatattttaacaaaattatgggaaagaacaagcctcccagggggatttgaaaccatgaaaaaagtagtatgaactatgcaatatatgaataggtaaatatcccccagggggtgtttgacaattgtttacgatctgaattttacttagttgctgtagccagaagtgctttaatatcttccatatcatcagcaaaataaattccctgctggcgattttctgaggacagccccatcttgatcatatggtcaagaagctgtttcaggctgtcataatatccattcagattatatagaatacaggaggcattaaggtgttttaaggaaaccatggacataacttctgcgatttcctccagagtacctgtgcctcctggaaatgcaataaatgcatcacctagttcaatcatttttgcttttctttcagccatatcttttgtgacaatcagttctgtgatctcatcatactgcagttcagaatctataaaaaactgtggttccacgcctgttacttttcctccggcattcagcacactttctgctatctgtcccataagaccggacttcgatccgccatatatcagagaatttccactttctccaatccatgttcctaattcccggacggcatctccaagtgccggatcattcccctccaaagctccaagataaacggtaatattcattgtaatttcctttcttttgtcatgtacaggtaatatctgtacatggcaattgttttatataactgcctcaaataacattaccatcagcggcattgtaataattgagaacagtgtagtcatgacattgatggcactggcatagcgtgaatcatttccgtatacctggcacatctgggttattgtggaagcagacggtgtgatgatcgccagaaagacaataagcatgattttatttccgtctgcagagaacatagccagatggctgatcttaatcattacaagtgcaagcaaaggcactgcaatcagacgaagaaatgatacaaaatatactcttttgtcagcaaaaatctgtttcagattcattcctgcaaacagcataccggttacgatcatactggccggtcctatcatgctgcccactgagccaagagtattatggatgatctccggcaaatggatttttgcgaaaaaaagtacaacaccgatgaaaatagaaatcatgttaatatttaacacaatctttttccagtcgtaggaagattcccggctgataatctttttgcagtgtgtccacagaaagataagctgcacactcataaaaacacatccatataaaacccagtcctgtccaagaataaaggtcacaatgggtacgatcaaatttcctgaattagaataataaacagaagcaatttccacttcattcagatgcaaaagctttccggctatggagataatgatcagaagaagaacctgggtcatgacagatgcagccagagcaagcagcaatccctttacagtatccatcgtgtaatctacctgaaaagcattgatgattacacagggaatgatcagatagagaatgattttggataaaaccttgctgtcttcatcttttacaagcccaactttcacgatcaaatatcccatgaagatcataagaaataattgaatgatctgttccatgagcagtatgctgatattcataaacttatccacctcgtattcttaaaaatgtccgtcatcgggaatattgtatttacccgatttctgatgtcggaactcattatagaactttcccggttgcggttcaatagtaatgtgcgaacagaaacagttgctgacaatattttacaggaagcaaaccacagatttgagaaagtgtttcagattatattatcagacagtttttcagcggaaatcttacagaacagcattcatagtatacgtcaggcttattgtttatcaataacggcatccggagaattaaaggattacgaagcagatcttagctgattctttctggacattctgatagtattatgtcatacttaaatgtgcagaggattgcggaagctgctttgcagcggagcaattcgtggataacatcatatgtattaattaaaatgaacaggagacatcagcacaatgttagatgaaaggatatatgagagttatataggaatcctgaaggaagaaatggttcctgcaatggggtgtacagaaccgatcgcactggcatatggagcagccagagcacgagaagttctgggaaaagaaccggaacatatcactgcaaaatgcagtggaaacattataaaaaatgtccgttgtgttatcattccaaactccggcggattgactggaattgaagcaggtgtagtccttggtgcagtagccggagacccatcattgaatatggaagttctttcgaaggtaaatgaatccggaagaaagagatgttgtgaacttttggacaaaaagatatgcaaagtagaacttctggactccccggtagttctgcactttatcatagaaatgcaggctggagatgacacagtaagtctggaaattaaatacgatcatattaatgtaacaaaaattgtaaagaaccaggaagtcctgctggattcagatcataaatctgaggaaactccggttgcagcagacagaactctactcaatctggaagacattaaaacatttgcagatactgtagaaattgatgatgtcaaagaaattatagaaaatcagatccgcagcaatatggcaatcgctcatgaaggaatgactggtaaatacggtcttggaattggccggataatacgcgaaacctattccaatgatatgcttaccaaaatgcgcggcctcacagccgcagcttccgaagccagaatgggcggatgtgacatgccggtagtcatcaactcaggcagcggaaaccagggaattgcctgttccataccactgatcgtgtatgccagagaaatggaacttccggactatatactttaccgcgcactggtattttctaacctcttaactgtataccagaaacagtatatcggtaaactttccgcattttgcggtgcggtatccgcatcctgtgcagccggtgcggggattacctacatgggaggtggcgaactttcagtgatcaagaagaccatagagaatactcttgccaatattccgggaatcatctgtgatggagcgaaaatatcctgtgcagcgaaaatcgccgccagccttgatgctgcattcctggcacatcaccttgctatgaacggtcagtcctatgcgccatataccggaatcctcaaggaagaagccggcgaaaccatcagctgtgtaggacagatcggcaaagaaggaatgaaagaaacagacaaagaaattctgcggattatgttagagcgtgtttgattttatgacaaagtaaaaaagaccggtatattctcctgctgaaaaaaagacataattgcactggttttgtgataagacaagaaaaaataatgactataaatttcaattcatctattatgttcatctgaaaataggaatataaatgacctgaaacgaaaaaagtataattacggtcatcttaaggaaccgatgaaaatgacctgaaacgaaaaaagtacaattacagtcatgtatagaagagaatatgaatgacttaaaacaagaaaagcaaaattacggtcatcttaaaatggaattatgaatgacttgaaataaagaaagtgaagaatagagtcaatataaagagattttttgtttgactgaatttgctgaaaataaaatttaagtcaaggaacttgagaaagtaaaaaatttttacgaggtaagcagatagatatgactatatatgagtatggaaatccagatgcggatactgttttgattcagttgactggtgatcatgaattatctgttcttaagaatgaggttgaagaaatccggaaacggacttcaacagatttcagactcattgctgcaaaagttgatgactggaattatgagttgtctccatggaaagcaccggcagtgttcggaaatgaagactttggtgatggtgctgttaggacactggagcagattctgacattatgcacagacaaaagcaggacatattatatcgggggatattctcttgcggggctgttctcgttatgggcagcatatcagacagatgtattttccggtattgcagctgcttcaccgtctgtctggtttccgggatttattgagtatatgaaggaacatgaaattaaaagtgagacagtttatctaagtcttggtgacagagaagaaaaaacgagaaattcggtgatgtcacaggttggaaactgtatccggatgggatatgggtggctcatagagcatgggatcaattgtaatctggaatggaatcagggtaatcattttagagaaccggatataagaattgcgaaagcatttgcctgggtaatggagggaaaataatatgtggatattatttgcatttggttctgctctgtttgcaggcttgacagccatattggcaaaatgcggaatcagaaacacagattctaatgttgcgacagcattaagaaccggtgtagtgttagtcttttcatggcttatggtatttgtagtcggggcacaaagcggaatcagagatatttcagcaaaagtcctgatctttctgattttgtcaggactgtcaacggggatatcctggctatgctatttcaaagcactgcagattggagatatcaataaagtaacaccaattgataaatcgagtacagtgataacgatgctgctggcttttatttttctcagggaagaaataacgtggctgaaatttgtttcaatgattcttatcggtatcggtacttatctgatgatacagaaaaaggaaacaaaggagaaggcagaagataagaagtggctgctttatgcagtcggttccgctgtttttgccagtcttacctctattttgggaaagattggaattcaggatgttaattcaaatcttggaactgcgatcaggacggctgttgtattggtgatggcgtggattgtagtatttgtgaccggaaagcagaatacggttaataacattgacagaaaaagctggctgttccttattctttccggagttgcaacaggcggttcctggctatgttattacagagcacttcagacaggtccggccagtgtggtagttccgattgataaactgagtatccttgtgaccattgcattctcatatattgtattccatgaaaaactgtcattgaaatcagggacaggactgcttcttattgttgttggaacgttagctttgctgatataactattataaaaaagaaaaactatctggaaaagtataattgcggaaactggctttttcaggtagcagagggatattcagatggtatttcagatgccaatggaatcctttgacccacgttgtacgctcggggacggaatcggagaaagcctgagaaatatggggataagccgtaccgaaacccgtagaaaagtggaagaacttctggaaagatgcggcctggaaaaagaatacgcagaccgttatccccaaattgtatatttatcctgtgtctgaagtatatcagacaggacagcagatagagcagaaatgtctgaagcgattttattcgtgaaagacatttctgctttttgatttcttactcaaaatgccgtaaaattttgtgtttttaaaaataaagaaagtgtcaaaaagcactaacaattattcagaaatctgtgatacaatggaaaggcgaaatacagaaatacaaatgaaaagagagaaaactacaaatgacacaaaaaaaaaatacattaacaaaaaccggtattgtagcgcttcttgcctgtgtttgctgcatcttgtggggaagtgcgattccggtgatcaagaccggctatcgtctgatgcaggtagactccgcagataccgagagccagattgtttttgcgggagttcgttttacgctggcagggattctggtgttgatttttgtttccattaaagaaaggaaagtgatgattcctgacagggaaattttgaaatacgcagttccggtatgtctggcgcagacagtgggacagtatttcttcttttatataggtgttgcacatacatcaggagtcaagggcgctattattaccggacttggaaactttattgcaattcttctgtcctgtctggcttttcggagtgaacggatgacaggcagaaaaattgccggatgtgttctgggatttgcgggagttgtggtaatcaatctgatgggaaattccctggatatggggtttaagctgacaggagagggatttattctgattgctcagttatcctatggaatttccacagttctgattaatcttttttccagaaaagtatcgccggtagtactgagcggaacgcagtttacgatgggcggcatcgttctgactctgatcggagtgggaatgggtggtcatctgggaaatattacagcaggaggtgtggcaatcatattttatctggcaatggtctcagcagtggcatatacactctggtctgtattgcttgcatggaatgatgtttcgaaggttgcaatctttggattcgtcaatcccctgtgcagtgtgattttgtctgcgctgatacttggagaggtgaagcaggcatttaatattggaagtttgatagcactgattctggtttgcacaggaatttatattgttaactgcaagaaaaaaatgtctcgataaactgcggagcagttattcggttataagcaagtagcgaagtagattgcggatatccgcttgactgattccgtaatccgggaagtctggaaagaaatcggcgtctctttttattttatgaaaaaaagagcataataaaatagaattttatcttgcaggaatgaatatttctggatatcaatctaaaaaagaacaggagaaattcagatgaagaaaaaaatttgtaagctgtcagcagcaggattgctttttttttcagggattatggagattggctggcgtttttttaacatggtggtctgctgcaaaagagggggaaggaaaaaggaaagaaagaaatggtttgaattatctcatatacgggataatcatcccagaaacggatatgcaaaggaatatgatgagagcagggcatggtgcgaggctcagaagatgcaggactgttatatccaaagcgtggatggattaaaactccacggattctatctgccggcagagcatgcaaagcggtctgttatcttaagccatggttacaggggcagcagatttggttccctggcatttatggcaaaatatctccatgagcatcaatgtaatcttctgtttatggaacagcgatgttgtggagaaagtgaaggaaaatatattacctttggagcaaaggaaaaatgggatgtgcagcgttgggcaatttatgtgtccgagagaaataaagaaaagcttccaatctatctgtatggacagtctatgggagcagccgctgtactgatggcatccggatacaggcttccgtcagaggtgaagggactgatcgcagactgtggttttcagtctatggaaagacagatgcgggatatggctgacaactggttccatctgcattatatccctttgcttttgaaggaaatggactgtctgtgccattttgtggcaggatttcgtatgaaagatgcagataccacagaagctatgaaaaggaatacaagacctgtccttttctttcatggagagaaggatacttatgtgtacccgaacaattcattccagaactatatgctgtgcaaagcaccaaaggaactggtcattgtacagggagcaaggcatctgtgcagtgcctatgcagatccggaactgtatcagcgtacagtgatggagttttttgagaaatatgatggcagtaattctgaaaaataatgtgactgttttcaaccgccaaaggcgattatgaatgataacaatccctgaccgggacttatcagatgcgtttttttaaatgcatgataagtctcggtcaattttatgtaaagtgttcattaagtactgagggtactggtatttgggaaaaatctgtgctatttttgtcacgtaattaaaaaagtaatgttgtagctgccagtacattatttttaaaataactgtgggctactgaacaagtatgtaatgtttttgtacccgggaaaagagaaaaaacgggtgatggaggttaaataaagtatgacaaactactatcctttaacagcagcacagaaaatgcaccataactggatcatggattacggtacacagcaggtatccggtgtcagtgttgtggcgtctgtacaggctgaactggattttggattattaaaaaaatgtattcagatggagacagaacgttccggatgcaccagaatccgttttacgaagcctgataaagacggaaatgtacagcaataccttgtaaaacaggatccaagagatatcggattcaaggatctgtcaggaatgggaagccttgcaaaagcagacgagctgatgcagcagtgggcatacgaaacctttgacggtgatgacattcccatgtgcgagtttactatgctgaagctgccggaaggatataatggtttctttgtacatatggatcacagactgatcgattcctgtggtctggtagtaatgatcggtgatctgtttcagttatatacctattataaatatggaacagcctatccgcaggaactggcagactttgagacagtactgaaaaaagaccttgcaaaagcaggcaacgagaaacgttttgcaaaagataagaaattctgggatgatcagctggatgcactgggcgaacctctgtattctgatattcagggcccgtccgtactggaggaagcaagaaaacgtcatggaaatccaaaacttcgttcttctgacattgagatgaaggatctgtttgtagcagttaaggattattatctggagccgggaccaactaaaaatctgattgatttctgtatgaaccatcagctgtctatgacaaaccttcttctgcttggcatccgtacctatctgtcaaaggtaaataacggacaggaagatatcactatccagaactttatatccagacgttctactcatgatgaatggacttcaggaggaagcagaactatcatgttcccatgcagaacagtgatcgcaccggagacagatttcctttctgctgcttatgaaatccagaatatgcagaatcgtatctacatgcacagcaattacgatccggcatttattatggatgagatgagaaagagatacaatacaccggagcatacaggatatgagagctgttatctgacttaccaaccaatgactgtgaaggtagagaatgaaatgcttggaactatccgtcagcatgcaaaatggtttgcaaacggtgcagccaccaagaagatgtatctgactgtatcccatacagaagatggaggtatgaacttctcctatcattaccagactgctcatctggaggaacatgatatggaactgctctattattatatgatgcgtattcttttcaagggaatcgcagagccggatatgagcatcggcgaaattatggaactggtttaactaaatcaatatcaggaggaaatgcaatgaatcaggaaatggaatttaaaaatatcgtagcacagtatagcaaggtagcatcggaagaaatgaataatgaaatgagattccgcgaggatctgggtttcagttctctggattttatgtcctttttaggtgagcttgaggatacctttgatcttgaacttgacgagagcgaagtgctgaagatcacaactcttggcgaagccttaaatctgctggaagaacttcagtaatttttttcgaagcaaaacttataaagatgtcagggtcaaggatattttgtacctgacaggatatccataacttgaacagttcagaaaataatgggggacagatatgctgatcagaaatatattagaagaaagtgtacgtaaatttgatgaagtaaaagcagtaaaatggctcaacaaaaaggaaatcatggaaagaagctatggcgaactgatggaaaatgtagtttccaccagaaaaggtcttcttgcagaaggctttgagggcaaacacattgcactgatcggaaccagttctgtagagtggatggaaagttatctgggaatcatcaccggatgtaccactgcagtaccgctggatgccgcacttccctgtgaggatctgatcgatctgcttaaccgttccgattccgtagctcttttcttaagtccgaagcttagaccatatctggatgcatttcttgaaaactgcccgaaacttcagaaggtgtggatgcttcaggaagaggtagaagatgcaccggcaaaggtatatggtattggtgaacttcgaaatgcaggaaagagcgcatcagcagattctgtctgcccggatgcagaggatattgcgaccatcattttcacttccggaacaacaggaaagagcaagggtgttatgctgacacagaataatctggcttccaatgttgaggcagtaaagattacggcagaaccgggaactgccgtgctcagtgtgcttccaatccatcacgcattctgcctggttatggactggctgaagggattctctctgggtgcaactctttgcatcaatgattccctgctccatatggtaaggaatatgagtattttcaaaccggagattatgcttatggttccaatgatgatcgaaactatttataagagactggctgccgctgatccgtcaattccgaaggcagttctggcagaaaaggtattcggtggaaaattgcgtattatctttacaggcggtgcacatttggatccatattatattgaccgttttgcagaatatggcgttgaagtactggaaggttatggaatgtcagaatgttcccctgttatcagcaacaatacaccggaaaatcataaaaagggttctattggaaaaccacttgaaaatgcagaaatcagattcgaaaacggtgagattctggtaaagggaagcagtgttatgaagggatattatcagatgcctgatgagacagcagagactttaaaggatggctggttgcatacaggtgataagggatatatggatgaagacggttatctgtttatcaatggacgtgtgaagaacctgatcatcctgtccaacggtgaaaatgtatctccggaggagattgagaataagctggctctgaatccgctggtaggagaagtgatcgtcacaggtgaggacaatggactgaccgcccgcatctatccggagcaggctgttgtggaagcgaaagcattggatgcagaggcaattcaggcacagcttcaggcatttctggatgaatataacagaaatcagcccacctatcgccgcattacaggattggttgtccgcaaaaatccgtttatccgcaacacaacaaaaaagatcaggagacaggatgtcctgattgatgagcctctggaataagacagaggcttaagataaaagtggaagcataccggataaaaaaacctcagacagaatatcagcgatcacttccggtgccagattaaaattatcccggctccatttgtggagaacgccgatggtactgccgatggcgcaggtgatcacataggaaacttcttcctttgtatgcctgtcaggcctggaattagatgtagtttctgtaacataatgatggagcatagtcagcattttttcaaacagatcattgccatgaggcgtgctcaaaagaccggacagaaaaggattttccatggtgtaccggcacagagtcagaaaataggaactgcagatatcccggtcattttttggctggaaattttccatcatggaaaaaacatcatgaatagttttatcctcaactgcagagatcagtgaagggatgtcctgatagtgattataaaaggtacttctggcaataccagctgttttagtgatgtcggatacagtaatcctgtcaggcttcttttcttttaacaatttgaaaaaagcacctaaaatggcctcgtcagccacagaatatctttcatcgggaattatattttgcatagttgtttcccccgggagtctgtaagtaatacataaagtatatcacaaatctgacgatacatcaggtgctttttctttttttaataaattttcaataatatataaagaataggtaaaggcttgatttatgaaagagtaaatgatagaataatattggataaaatattgtctgattttaatgaaatagcgaaattttggataaaataatatccataaaataataaaaaacaaggagggaaaatggaacagtttgtatgggaaacagcagaggaactggatcagaagcttgcacaaagggtgcgtaatatcagaaaacgacgctctatttctcaggaaaaattatcttccatgagcggagtaagctatggttcaattaagagattcgaaactaccggacagatatcattgatatcactgacaaagattgccatggctttggatattgcagatgagcttagaaatatttttacgcatgttccatatagagatattcaggaggtcataaatgagggaaggtaatgcattacaggtattttatgatgaaaaacttgtaggaacactggctatgacagctgaccataaagctgcgtttcaatatagtgaagaatggattgaaaatggttttccgatcagtccgttttcacttccacttaaaaagcaggtttttgtaccgacaaaagattattttgacggattatttggagtatttgcagatagtttgccggataattgggggagattgttgttgaatcgtctgctacgtgcacataagcagaatccagacaaattaacagtgctggatcggctggcaattgttggaaagtcaggtatgggagcacttacctattatccggagaaaaaaatagatgagcaatatggagatgtggatctggatgaacttgcggagcagtgccggaaaatactaaatacggaatactccgatagattggatgaattatatcgtctcggtggtacaagtggtggagccagacccaaaattatgactacagtgaatggagaggaatggattattaaatttcctgcacatgtggatggagaaaatgcagggaagatggaatatgattattcatgctgcgcaaaaaaatgtggtattataatgagtgaaaccagactgtttccatctgagaactgtgaggggtattttgggattaagcggtttgacaggatatcagataaaaatggaacaaagagaattcatatgctgacagctgctgcgttgctggagttgaattttgagcagccaagcctggattatcacagtctgatgaaactgacaaaaatattaaccagagataatgagaaagatatgagagagatgtttcgcaggatgtgttttaatgtttttgcacataacagagatgatcattcgaagaatttcacctatttatatgatgatgaaaaagacagatggagcctgagtccggcatatgatcttacttacagtaacacatactatggagagcatactacaacagttgacggaaatggacgtaatccaggcaaaaaagaactcctgactgtgggaattgcggcaggaatgaaaaaagaggtatgtatagaaagtatggatatggtagaaaagtgtgtgaaaaatatgctgggaagatatctttaaagaaatcgacatgtggaataatttgttacttggaggacaaaaaatgactattagaaaagcagaagaaaaagacattctaagaataattgaactgttgggacaggtattgcagatccatgcagatataagacctgatatttttattcccggtaccacaaaatatactgtaagcgaattgacagagctattagaaaaagaagaaaaacccatatatgtagcagtgaacgaggaagatgtttgtgtaggatatgcattttgccaattacaggaacagcctttttcaactaatatggtaccgtttaagtctctttttatagatgatctatgtgttgatcagcacgcacgaggacagcatattggtgagcgtttgtttgagtatgtaaaaaacgaagcaaagcgaatgggctgttatgaagtgacactgaacgtatgggcaggaaatacttcagccgaaaagttctatgaaaaaatgggtatgaaaacaaaagaaaggcagatggaatatatcctggaacattgatgcgttgtatggcatatttgagaagtctatctgcgaatttacagagatatccgatggatgaatccgatcagtcaaacagtaaatattaaaagaaaatgcaaatcaggcacaagttatatttcggaaacttgtgcctgatttttacagtgttatttggaaattacaggtgcttttgtccgatatttttagcattgatataatttatgatcatgtctgctgcatcggaaatatcaagtttgcctgtatcaatagacagctgatactggctggcgtcttcccattctttgcctgtgcagaatttgtggaaagatgctcttttctcatccacttcctttatcagctttgcagcttttttctcattaataccgtcccgttccattacatgtttgatacggcagtctttatctgcgtgaagaaaaacagtagttgcctcaggatcatttgcataaatcgctcctgaacagcgtccgatgattacggcaggtttttgctgcgtaagttcacgtataagttcaaaagatttttccatcggattgctttctccgtagcttacagcaatgctgtagagcaggctgtttactgctttttcctggaaaaattctttgttttcgtcaagctttccaagttttttggcctcttcttccaacttctttctgtcatagagttccagtccaagtctggaagccagttcttttcctatttcatgtccgccgcttccgcactgtcttgctattgtaataatcatatcccatgcctcctgtgcaatgatgttgcatttatttactgtcaaagtactttttcggaattattatactcaaaaaaaatcgaaatgtatatgccaaaatctactataaattgccttcgcaaatcctgatattctggtacttatggcaaattggtctgacaaatatttacttaatagaaacattagacaaatactttatattgagatatgatgagaattatgggagctgctttgcagcggagtatttgaagcagctacgatccattatgctgttgcaaaaatattcggaccacttttgtttggaagaggatggtgcggatatgcctgttggacagctatggtgttggactttttaccatataaaaagcctcaggctgcaagaaaaaagataggtttcatccggtatattacatttgcattttcgttctctttcgtggtgctactttttctgaatcacgtagagaatatggagaaaatcatgtttatagcttttatcgtggggaatattctgtattatattgtggggattattctggcattcctattcaaagataacagagcgttctgtaagtatatttgtcctgtcacgatctttctgaaacctatgagctatttctctgtagtcagggttaagtgtgacaaagagaagtgtatttcatgtggaaaatgtaaaaaagtttgtccgatgaatgttgatataaccgataactccagaaaacggaaaaacggaacagaatgtattttgtgtatggaatgtgtcagaacctgtccgaggaaagcactttgagtcgaatttcctgcaggatgtactttggtgtcagctgttactgagaacggagcgaacagtagtgtaagacctatgttaaatatagttaaacctcagtaaagtctattgaacttttttctcaatgtttctatactctccaatgtaatgaacacccgatctgtgatcgtgtggtgaaacattcatttctcaggaggattatgaaaaaatgaacaacttatggcgaaaaagttttatggcaggtattttatcagtttcactgacagcaggagcggttactccggcatttgcaagtgcagcaccggacggaaaaacagatgctgcttctcttgcaggcggaatgggaatttcccggaactgggaatcctggaaagcagagtgggaagctgttaagaatgactggactcaggtttcacttactccgggctctgactttagccagttaaacttcgcatggtattctaaaaaagacaattctgacacagcagaaaagaaagaagaacaggctgcacaggaattctccaatcagtcaggcgatgctttcagtgacagcagtgaacctgcctttacagaaacagaagcaggtacttcagtgacagatgaaacattggaagcagcacaggctgaagaaacagaattaaatgtagcaacagaagcaaatacagcagcggaaactgcaatagctgaagtggatacagcaacagaagaaagcacagcagcatttaatgcggaagaaggagaaaacgcagtagcatttagtgcttctgagaatgacgaagaggaattcgcggcagaagcaaacgcagataaggatcttcctgattttgatacagaaagcgatgaaagtcgtgcaattgccgcaatggtagcaaatattcttggagcacaggctgatacaactgcaccgaaactgatcatcggtgaaggcagaaatatgaaaaatgccaaagtgtatgttgcagagcagacagatgcaacgacaaatacaaagaccaatgaggcatatgtttccaataaagtgacagcaacaggtctgagtgccaatactgtgtactattacagctatgaaaaagaggatggaacctacacagaacctgcagaatatgctacaaaatcaacaaataattacagctttattttcgtaggtgatccgcagattggatcttccaatgaactgaagggctctgatacagcagaattttatcaggcacagtccgatgcggtcagaaatgattcctttaactggaacaccacattaaatgaagctatggataaaacaggcggaaatgcaagcttcgtggtatcagcaggtgaccagatccagacaacaaagaagaaatctccgggaaaaagtgaaatgaccagcgagattgagtataccggatatttaagcccggatgtgctgaaatcccttcctgttgcaacaactgttggaaaccatgacgcagataatgcaaactacacatatcattttaatacaccaaacagcagcgacctgggttctaacggagttgttggtggagattattatttcacatatggaaacactctgtttatgatgctcaatacacaggataccaatgctgctgaacataaacagtttatggaacaggcgattgctgcaaatccaaattgtacctggagagtcgtaactttacatcaggatatttatggttctgcagagcattccaatgagccggagatcacaaacctcagatatacactggtaccctattttgaagcaaatgatgtagatgttgttcttacaggacacgatcatgcatattcccgtacccatattcttgagggtggacataaaactgtagaatatacggatgatgagtttgatgcaaagctagacaaggatatggatgcaggagaaaatccggctacaagatatgaagcaccggcaaatatttccgcagattcaaaggaaccggctgatgtggcttatctgaattatctgaatgcagtcatggataaggatgcgatagaggatacagaaaagggtgagacagttgtaaatccggatggtattctctatatgacagcaaactcttcatcaggaagcaagtattatgatcttgtaccaagaatgcagagctatattgcaaacagatggcaggaagatgttccgacttattctgttattgatgtaacagataatacatttacaatcaatacttatcgtacagataatgaccagaaaattgatgaaacctttacgattaaaaaaggtgtgacagaagatattaaatctgcatctgtagggaatgtgaagaatcagatttatacaggaaaacagatccagccggctattaaagtaactctgaatggaaagaccttaaaggcaggaaaagactacacagttacctatacagataacaaaaatacaggtctggcaaaagcaaccatcaatggaatcggaaagtatacaggaacacagacagtaacatttaagattgtgccaaagaaagcagtgttaaaaactgtgaaagccggaaaatccggaacagccactgttacgatcggaaaagcaggtggaaaagtttccggctatgcaattcaggtttccacagattcttcattcaaaaaggtaactacttaccgtacagcaaaaactacatatactcttaaaaatctgtccaaaggaaaaacttactatgtaagagtaaaagcatttaccaaagtttcagacaagaacgtgtatggtgcagcaagcaaaacaattaaggtgaaagcaaaataatgttaaacaaaaatttccttcggagagggtgcctggtgatcgcaggcatccttttcctcatttttctgatgcaatataataagatcgaaaaaacagaacttctttctacagagggcagaacctttgagaaagcagtagtaacagaggttatttcagataaccttacagaaaacggaaacagagtaggtaatcagaccgtcaggctgcgactctgttccggcaaatttaagaacgaaaaagtggaagcaatcagttcttccagctatctgtttggtgcaacctgtaaaaagggtatgaaagtcattgcactggtcagtgaatcacagggtgaagtcattgcatctgtatatagtgctgaccgtgaattttccttatattttatgattgcagtgtttcttctggcaattatcctgatcggtggaaaaaaaggtgcggcatctgtaatggggctgggctttaccattgtatgtgtgctgtttctgtttcttccgatgatatacagaggtgtttcgccaatcttttcagcggtagttgttgccgttataaccactgtagtaacaatttatctgatttccggaatttctgttaaatcattaactgcaatttcaggaactgtaaccggtgttgtaatggctgttatatttgcaggaatatttggaaaagtaactcagatcacaggttataatgtaagtgatattgaagagttgatttacctggaagagaaaacagctataaaaataaatgaacttctgtttgcagggatcctgatcgcatcactgggagcagtaatggatgtaggaatgtctattgcctctactttacaggaaatatacagcagacgcccggatcttggaatgtgggacttgtttaaaagcggcatgaatgttggaaaagatatgatgggaactatgtcaaacacgctgattcttgcttttgcaggtggctctctcaacacactggtatttatttttgcatataactattcctatcatcagatcatcaatatgtattctattgggattgaactgatgcaggggatttccgcaagtatgggagtaatcctgacggttccctttacctcactggcaggagccttctttatttcaggaaaagtattgaaaaagtgattctcgcaggaggaatcataaaacgatgaaagtaaacaaagcagatgaattctataagatattagagagaaaagccatatatccggtgtttcagccaatcgtcaatttacagaccggcagggtgtccggctatgaggcactcagccgtatagacaggagtagtacgacacttacgatttcagatttgtttgtgatcgctgaacagttgggatgcgtatggaaattagagaaactatgcagaaacaaagccttgaaggcagcagttgaaaaaccggaaaatgtaaaattatttcttaatgttgatggaaatattattcaggataaagcgtttatacagggatttacaaaccgtaaggctatgaaggcaggggttcctgcttctgatattgtattcgaaataacagagagatcagacatagaaaactatcagatattgcagcagatcatgaaacattatgcagatcagggatatgagatagcattggatgatgtgggagctggacattcaggtctaaatcgtgtagtgaataccacacctgactatctgaaagcggatatagaactggtaagggatattcacaaggataagaaaaaagagatcatgatgaaactcctgttggattactgtaatgcaacaggagcaattctgatcgcagaagggatagaaacagcacaggagctggaatgtctgcacagcttgggagtacattacggccagggatttttcctcggaaaaccagaacgtgcatttggaaatatcagtgctgaatcggaagaaatattagagcgattaaatgggagaaagaatattttatttttggatatatcaggcaaataagccattcatttttctacatttttcaacaataaatccgaaattacaccagttgattaatccctgagagttgtgtataattataaaaataaagttttctagtacatcgtttcgtaaataactataccaatcgcgtaggatgcggattcgagtgtgctggtataaaaacgcaggcgtagcgggctacgctgaggcttttagacctgtgcaatcggattcgcagacaagtgagtggtatagttatttcgaaaacgatgtactagaattgaggagtgggttatggatcgcttagcacttatttttgataaaccagcagaagcctggaatgaagcgctgccccttggaaatggaaccatgggagcaatgtcctatggaagatttcaaaatgaaagaatagaattgaatctggattcgctttggtctggaaatggaagaaacaaggaaaatcccaacaaaaatgtcgactgggatctttttagaaaacacatttttgcaggggattaccagggagcagagaattattgcaaagaaaatgtgttaggagactggacagaaagctatctgcctgcaggaacgctttccattaatgtgaaagaacccattcaaaatggaaacagcttttatagaagagaactgtgcctgacgaatgcaactgaaaaaatagaattctgccaggatgatttgatttatcaaagagaattttttgtgagtatgtcagaaccagtgatggcaattcattatcatacttctccaaattgcaatcttgaaatgtcaataacactggaaagtgaaataaagcacaaatctgctttttttgcagaaaatggaattatattagaagggcaggcacccatttatgttgcaccaccttattattcctgcgaagttcctgtcgtttatgaagaggggcagggaatccggtttgcaattggattatatgtacaaacgaacggtggaaatgtatatcagcaagcggataagctttttataaatactccaaatgatgtgtatatttacgtgtccggagtaactgattttaaacaaaaagaactctttttttcaaaaagaaactgtatgatggaaaacatccagcacattcaatatgaaaagcaaaaaaaggcgcatatggatgtatacgcaaattattttgataggatgcatcttgacattaattatacacccgataatgaacttgcattaaaaatgtttcattatgcccgctatctgatgatctgttcatctgtacccggttcacaatgtacaaatcttcagggaatctggaatcaccatatgcgtgctccctggagcagtaattacactgtaaatattaatacggaaatgaattactggatggcagaaaaagcaaatttaagtgactgtcatatgcctttgcttgaacttatagaacgtacctcaaaaaaaggtgaaaaaacagctcaggatgtttatcatctggctggctgggtaagccaccataatctggatatttggggacactcaagcccggttggacaatttggacaggacgaaaatccctgtacatattccatgtggccgatgagttctggatggttatgctgtcatttatgggaacattactgctatacattggatgaagcttttttaaaaaagaaggcatttccgattatacaaggggccgtagaattttacctgggctatctggtaccttataagggatattatgtaactgctccctctacttcacctgaaaatacattccttgcaccagatatgacgacgcatagtgttacgtttgcgtcaacaatggatatcagcatattgagagaactgtttggattatatttaaaagcatgtgaaattctgggagtagaagattttacaaatgcagtcaaaaatgtgcttcagaaacttcctccctataaaattgggaaagaagggcagcttcaggaatggttttatgattacccggaagcagatatcaatcacagacatatttctcacctgtttggattatatcctgggaaccagattcataaagagaatgaacctcttatagaagcctgcagaacttctttggaaaggcgtggggataagggaaccggctggtgtatggcgtggaaagcctgcctgtgggcaaaacttggagatggaaatcatgccctgactttattaaaaaatcagcttcgcttaacaagagaagaagcatgcagtctggtaggtggcgggatatatccgaatatgctttgtgcccatcctccgtttcagattgatggtaattttggatttgctgctgctgtgctggaaatgctggttcagtatgaagagcagaaaattgtttttcttccggcattaccagatgaatggaaagatgggatggcagaaggcgtgaaagcacctggtaatatcacacttaatttcaagtggaaagaaaaacgggttacggaaataaatctgaaatctccaattgatgcgaaactggtaatcttatataatggtatggaagaagaaatcgtcctgaatgctggaagcagttatcagaagacgctgatataaagaatatattatgatatatgaaaggcaggatatcttgtgattataagacatcctgctgttttatatcagattacctgcttatagatgaaatcgtttcccatattcagaaggtgaaattcccatacactttttgaataatcgactaaaataaagttgatcgtcaattcctaccataacggagatctccttcagggaaaaggtattctcctttatcagtgtagcagcttttcttatccgcagattgtttaagtagctggtaatacttgttcctacttcggacttgaaaacacggcataaatagctagtgctgagattgacatttgccgaaatggaggataatgtgagacggtgcatgtaattattttctatgtatgtaagggttttggcaacatcatttttataatgcccctcactatgaagaaagtcctgatatgtggtcctggcctcttcataatttttcagattttctttatatggcatatctggtgcaaaggattggtacatggtaaaacggttatacagcttttttatcagctgttccacttttacttgactgcacattaattctttttgggaaaatactacgagcgcattatgggcactaagaacaagaatgtatggctgtagcactccctgaacagcatccagtatcatatctcgcagcagattagctgatatagaaaatgcatcatttgataaaaatttttcaaacgttacatagcatacagcacaggaatgtttcataaatccaaatttttctgctccatatctttcaatgaacgaatcgagagactcttctccctgaaaaaaggagagaagatgatcggttatgggttcagtgatgtctgttttcagaatggaatcttttcggtcagctgtattttgcattttttttgtggttttgttcagacaggcaaggagtgtatctggttgaattttgatttttaacagatagtccgcagcacctaaaagcaatgcacttcttactgaatcgaagtcttcgtagttgcttagtaccagtatttctccgggatattctttttccttcagaaaacgaattagttccagtccgtccatttcaggcattttcaggtcagtgataatgatatccggatgatgtttttcaatcagtggaacagcctcaagaccatttgatgctgttccacaaatgaaaaaaccatgctcttcccagggaagaatggagcgaagcgcaatttttacgattggttcatcgtcaataattaatatactgtacataaaagtcctttctgtgggcaaaagtggttgtgatttttagttgttataatcttttgacagttcttgtgcatatagtaagggaagagtcagcgtacatgtggttccttctccagggtgactattgaccttaagtccatattcctttccaaaattcagctgtattcggtcatttacattggtaattccaatctttttccggtttgtatgaggttccagcgctgcaggtgtcacttcaaatccttttccattgtcacagagttctatgataagatgattgttttcttcccaacaggtgattagaatttccataacggagccgtcatcagaagaaccatgcataacagaattttctgcaaggggctgcaggattagtttaggaacaaggcaggagagcagttcttcctcttctacgtcaaaagagtactcaaagcttccggcataccggattcttaaaatcgcgaagtagttttccaggttctcaagctcttcctgaatggttatatactcgtttttattagtcagtgtattttgcaaaagactgctgagggcctggattccatcacttacaatctggtctttatgcatggcggctacaaagcgcagactgtttaaagtgttgaaaagaaaatgaggatttaactgatattgaagcatctgtagctccaattctctttttttcttttcctggcttttctgttgtttcatcaggctctcaatggtatctgccatatgattcatgcttccggaaagatcggaaagttcgtctttgtggtcatcctggatccgtacggaaagatttccctttgataattccctgcaaaaatccagcatgcttctgatgggggaggtaattccaggatacaccatagctacaattccaatgcagagtagaacaaggaagaatgccacagccaggattttccaaaacatagtgttaacttcagaattaatataatgatatggcatggtatatacaaacagctggttcaggtttttattgaaaatataagtaaccagctgttcttcgccatctttgtaaatgctgaaaaaatctgttctgtttggaagtcttgcttgaatatttttcagcagctttttttcggttttttgccccagttgaatactacgatcccaggaagaaaggattgttccatccatattcagatacataatattggaagagtcagccagacctactggttccagtactgttttggaaaaaattttttcatcaatggaaatcagggtataaccaattacacgactctgactgtattgttcataaattcttcttccaagaatcaggatgtcccggttacggtaagtatgtgcgtatgcccatacatcctgattttcttcttcaagacgactcaggatcctgcttacatcatccgaatataacccatcatatcccaaatcataaaaaatattcccatctgtatcatatactgtaatgttttttgcctgtgcaggatagatgattttacttcgaatcatatgttggatttcattgatggcttgattcttttccgtatctgtcataccctttttcagaagaccgtccttgatttcctgactgatgcagatggagccgcagagatactgatacttttcaatctcacttaccatattcagattgatcatggataaagtctgtgagatggaagtggaaagtttttcccgaagcgcttctgaaaaaatatgaaacgaatagaagctgattcctgttaatggtacaatagagatcaggaaaagcgctatgatcagcctggttctaatactgaattttcgaaatccctgatatcgttgtcttttttccatgccgctgtccctcatttctaaaaaataattcgtacatggtccggtaaagatggaaaaaatcgttctgattttcatgactgtatcggattgtgacagatttattatacaggaaaaaaacaagataatccatttaaaatacaaatagaaaaagattgtacatatatgtcgcaagaaaatccatattatataaaaataacagaaaaatgttccatataaagaattgttttgtgaatttaccacaagaagattttccattatactaatatcatcaggcaaacataataaaagccaacaagaaggaggaaacaacctatgaagaaaagatttgcagcttctgctatgatccttgctatgagcgcagcaacagtactttccccgcttactgcatttgcagaggcagaagaacaggaattgaacattgccattttccagggtggatatggggatgcttactggaatcagatggtggagctttttgaagaaagccatgagggcgtgaaagtaaacatgactatcagccctacaattggagatatcatccgtccacagattgtagctggaaatgcacctgattttatctgtcttaacgatggtggtgaggatggtgtaatcctttccctgatcaaagatcatgcacttctcaacctggatgatgtttttgacggagaaaattatgctggaaccggtacccttcgcgatgatattacagatgggatcctttccagtacaaagtgtgcaccatacggagatgatgagatctatctggcaccattcaacagtggtccgcagggtctgatttacaacaaaacattctttgatgagaataatctggaagtgccgaagacctgggatgagttctttgcacttggtgataaggtaaaagatattgacggacgtgcacttttcacatatcagggaatttatccgggatacatggaagaaatgctctggccggcaattgcaaatgagtgcggcgaagaagcacttactaagattgccaattacgaagaaggttcctttaataatgagggtgtgttaaaggctttaagtcatattaaagagattgcagataaaggctatctgttagagggcactgttggtatgaaccatacagagtctcagacagagatgatgcttggaaaagctgcatttatcacaaacggaacctggatggaaaatgagatgcaggatgcgccaagagaagatggatttgaatttgcaatggctccgatcccgaccgagaacgcagacgatgtgcactatgtatttgacagctgcgagcagttttccattccggcagctgccaagaatccagaacttgcaaaagaatttcttcgtttcctgtatagtgatgaatctgtatctgcttttgcagaagcttccggtgccctctatgctaccaagagtgcccgtgaagtagcaaaagataagctgtctactgcaatctacaacatgtacggaatctacgaagaggcaactgcctcctccctgattatgagcttcgcagcagttccggctgactgcaaggttaacccgaaagatgagatatttaatccgattacatctgttatgaatgatgaaatgacagtggaagagtgggcacagaatgtggaagatgcttttgcacaggttcgtgctgatatggaagctgccaactaaacttcatataccaaccggataaaaacggtaaagcatggaaaggctgctacacagtgtatgctatgcagcagccttttgtaaccctgaacagatatatcgccaatcggtgatgtcagccacatttattaaatactttaaatttaaagaggtgaacaagcgtggtaaagaagcccagattatttatagccctgtgtacgcttcctgcattgattttaaccattgtttttatgattgtgcctatggtaaatgccatttatctgtcttttaccagttccactgcacttagcgtaggctttaacagcaaatttgtatttttggataattacaagtatatgttccaggataaggattttcttcaggcactgtttaatactcttaagctgatgctggtaatcccggctgtgaccatatttctaagtcttgtatttgcatttatccttactcagggacagctcaaggaaaagtcattttaccggaccgtattctttttcccaagtattgtttccatgactgtagttggtattgtgtggtcttttgtgtttaatcccacaagaggaattctgaatcatatgctggatctgttccatctctccacttggaaacacgcatggcttggagagggaaaaacggctctctggtgtatcggtgcagccctggtgtggcaggctattggttattatatggttatgcatgtggcttccattgacgggatttcccaggaggtttatgaagctgcttccattgacggtgcaacaggagtgcagaagttctttaggattaccattcctctgcttcgcagatccattggaacgacctatatactttccctgtctggtactatcaatttaagttttactctgtccaacgttatgacaggcggtggaccaaacggtgcttccagtgtgcttttgcagtatatgtatacgcagggtatgcgaaacgctaattttggatatgccatggcaatcgccatgtttaccctgattcttgcaattgtgcttgcaatgatttctaaaaaagtatcatctgaaaaagaataggagggagactgatgaaaactgtaagaacctggtgtatcagaatcctgatgattctgtttaccgttatctttttgtacccgcttttctggaacctgatgtctgcgtttaagacaaatgcagaatatttgacagatccctatgcattgcccacagctttgaatttggataattttgtggcagcatggcagaaagcaaatatcgccgcttattttggaaattccatatttgtgactgtgttttccactgtattgctattgcttctggttattcccatttcttatgtactggcaagataccgttttgcgggcagcaaactgatctctgccatttatatggcatgtatttttctgcaggctacctacattatgattcctttgtttctggaattacaggctgtgaatggattaaataacctgccggtactatgccttgtttatgcagttatgcagtttcctttttgtatctttactttacagggctttatgtctgcagtacccagagactacgaggaatctgcaagaattgacggtgctactaatatccaactgctatcaagagttatggtgcctcttgcaaaacccggaattgcgaccattacgatgttaagtgccatgggcttctggaatgaatatccattggcacttgttcttctcacggaagatgcaaagaaaactcttcccatcggaatggcaaacttgtttgaagtgcagaaatatgccacggactggggtgcactgtttgcaggacttgtaattattatgattccaacaatcattatttatctgattggacaaagatatctgcttcagggaattggtgcaggcgggttaaaagggtaaaatgaaaggggaaataaaatgccaactgatcaggaattaatcaaaatagttccctccagccgccagcttgcctatcaggcaacagagttttatgcgttctttcattttggaatgaatacatataccaatcgtgagtggggagatggaacagaaacaccacaaatttttaatcctacagagtttgttgcagaccagtgggtgtctgcagcacaaaatgcaggtatgaaaggggtaatccttacctgtaaacaccatgatggtttctgcctgtggccgaccagatataccagccatagcgttgtctccagtccatggaaaaatggaaggggagatgtggtctgggaagtgtctgaagcatgccgtcgttatgggatgaaatttggaatttatctttcaccatgggatcgcaacaagccttgttacggaagcggaaaagaatatgatgattactatctggcacagctgactgagcttctcaccggttatggagatatttttagtgtctggctagatggtgcctgcggagaaggaccaaatggaaaaaaacagatatatgactggaaacgctattatgaatgtgtcagaaaatatcagccagacgcatgtatctgtgtgtgtgggccggatatcaggtggtgcggaaatgaagctggcgatgtaagaaaatctgagtggagtgttgttcctgcacgtacagcacttgcagagagtgtacaggaaagaagccagcagaccgatgataaggaatttagaatgcgccggatcaccagcgacatggaagatcttggaagcagaagagcgcttgaaggtgaaacgaatctgatctggtatccggcagaagtaaatacttctataagacctggatggttttatcatccagaagaagatgatcaggtgaaaagtctggaggagctgatctatatctatattggggctgttggaggaaatgcaacctttttgttaaatattccacctatgccaaacgggcttcttcatgaaaatgatgttaaacgtctggaagaatttggaagttggaaaaagaaatcttttactcataatttaatgagtacagcacatattttttcagaaaatgaagatccgacgcatccggtttctgatttgacagatgatacttcagaaacctggtttcagcctgaaagcagcgaactgccagtagaaataaccatttgtctggacggttcatacaacttagggtatctggtattaaaagaggctgtctgctatagtcagagagtggaaaaatttgagatatttgttaaagagggggaaatatggaatagtatttacacaggaacagtaattggttataagaagatcatttctgttaaggggcaaaaagcccagaaagtgaaaattgttttacatgatttccgtgtacttccgctgctctcatttgttggaatttatcctgaaagtctttaatagggaaagcattctttctaataatatcttaaggtagaagcaagaagatattattagaaaaccattgaacctgcttgaaagagagaacattcaaagcaaaattgccaattggtttggaatagatttttccaaactgtagattgtttttataagtaatcttggaactaatgcaggagtcatggtgcaaatggacaatgttcgcagaaagcacttgtcttttagaaaggctcgtattaaaatgcttgtcagtgatcaggttgcagaaacttgcgatgcctgcgaccggacggaggacctaagggtcctccatttttctatatacgcagatttttatagcgatagaaaaagcattaaaaccgataaaaccatttttgaactatgaagaatagattagaaatctcattgcgcgaaaagggatgattattgttgactgtgagttcactgcgtctaaattaaaagatatcagttattttgccctgatagatgggtacaaaaatctgttttacaatcccatgagttagaaacgatttttgaccataacacagttacatgatataatttcaaaaacagcagaacaattgcatatcacctagccaacagaactgtcagcattattccttcgctggacaaaaaggaataatacagttaaaattaatcaaaaaatcaatcgcaaatttttacgattgcattgacagtgattctccttatctatatattattgcagtaggaacaacttatcaagtactcggaaataactaacttggtaataaaatttttactggaggttatcagaaatgacagaaagagaaaaaatgataagtggagagttatataatccaacggataaagaattggaacaatttttaatttcacctgcttggatgtatgtgaagtacatataggagataatgtgatgattggtccaaatgtcacattggcaactcccatgcacccatttttacctgaagaacgtaatagcagaaaaagagaagatggaagcttttataatcttgaataggcgaaaccaattactataaaagataattgctggctggcatccaatgtggttgtttgtggtggtgttaccataggagagggatgtgtaataggagcaggaagtgttgtgacaagggatattcctccatatagtctggctgctggaaatccatgccgggttattcgcaaaataactgaaaaagatcatatggaataagataattacaatcaatatttagtgtattatgacaacaaccgttatcagtggaaaaggtgagggaatcggttatgagcaagtagcgaagcggattgcgaatatccgcttgaatgataagatttaatataaggctattgcactgagtaattagtgcaatagcctttttgccaaaataagttagttttaactggttgtattacggcgaatcaatattggagtaatctgtttatggacaggcttttccagtggtttaggggaacgttttttttgttcttccatctgttgaaccagaagctccatggcagtttgtgcaataatatcaatctgctgaccaacggttgtgattgggagaattgcctcactggcaatgggagaattatcaaatcctatgatttcatagaaagagggtaattctcggtatttctggaaaatcaggttaagaaacatgtttgcataagtatcgttggaaaggaaaataccttttttttgattgggatatttctcttctattcttgtaaaaatgcgtcttatttcatttaaaatttcctgataagaattaccgcttacacttagatcaatatcataaggaacctgatattcttcacaggtttccttaaatgcgcgaatacggtcgtaagcaggaactgttttctcaacattgacattgatgtggatcagtatatcacatttatcacggatcagcagagtggtagcctgaagcgcacccatatagttgtcagtggtaacactgctgatatattccgcttcacgttcaatggcaacgatgggaatctgataggaggataattgttttgatgacagcgtatgacttaaaacaatgagaccttcaatctgataggataggagctcttcaatatattgctgttcttcttcagccccatgttcactgctaaagacgagaaatttgtagtgataatcactgtagctggacagcagttgtgtcagcatttcagaataataatgcagataaagattcggaataatgattccgataaattcactttttccattcgccagaacttttgcaagtttattttttttatagccaaggatatcaagggcctgagaaattttttcctgattttcaagtgtaagggaatcaggatgattgaaatatcttgatattgtagtttttgaaaaatgggtatatgctgcaatatctgcaaatgtcacctgtttttttgacatgaaacttattctccttataaataaatgcaaatattttttttagtatagcaattattatacaaaaaggcaatattaaaataaccgattacgtaaccggttattttaatgaagaaaagtgttgacagagagtgtgtgatgtagtaacatcagattataaagtaaccggttacttaaccggtttcatgaacaatgtatgaaaggaatggaggaaaaagtgcatgaaaacagtgcagaaccaagcaaagcccgtaagcaagcagacgtggagaaataaggttacgtatgtgaagaaaaactggcagttatatctttttttcttaatgccgggacttttactgacaatcatttttaagtatcttccgatgggagggcttttgattgcgtttgaagattataatgtaatcaagggagtacttggaagtccatgggttggacttgaatatttcagacgttttttatcatcaccggattttatgaactatctgatgaatacattaaagctgagtatctatggattattatggggatttccggttccgattattctggcattacttatgaatcgtattcaaaaaacagggatcaagaaaaaagtacagcttctgatctatatgccgaattttatatctgtaatagtactttgtggtatggttcgtatgctgttatcaccggtaggacctttgaacaggctgcttgggattagcacaaactggatgacaatgccatctgctttccgtactatttatatagcaagtggaatctggcagactgcaggctgggcatctattatgtatactgcagcattatctaatgcgagcaaagagttggaagaagcggcagttatggatggtgcaaaccttttgcagcagatctggtacgtggagcttccggcgattaagaacattattgtaattcagtttatcctgcaggcaggaaatattatgagcattggatttgagaaggcatatgcattgcagacagatatgaacctgccggcatcagaaattttatctacatatgtatatcgcatcggtcttttgaacggtgattatggttattctacggcagtaggtctgtttaattcagttgtaaatgtaattctgttgatttttgtaaactgggttgtaaagaagctgaatgatggagagggattataggaggaagagaagatggagaaaaagaagagaaaatattcaaggacagatcgtctgatccttggaattggattcacgattcttggactgtttgtactttctattgcgattccaattatatatgtagtgcttgcatcttttatggatcctactgttttgaataatcagggactgagctctgatattaaggactggactttggatgcttatagaagagtactggagaatgagatgatctggcgcggatttttgaattcttttctgtattcatttgtatttacagtgatctcagtttttgtaacattactggcagcctttcctctgtctaaaaaagaatttgtgggaagaaaattttttaatctgatttttctgatcacaatgttttttgggggaggaatgattccaacatttattttgatcaatcagctgcatatggtaaatacagtatgggcggttttgattccgggagcatttaacgtttggaatatgattcttgcaagaacttattatcagtcaattccggcagaattaagagaagcatctgcaattgacggtgctaatgaaattcagcattttttcaaaattatgatgccggtatgtaaaccgatcattgcagtactggcactgtggtcatttgtcggaatgtggaatagctactttgatgcgatgatttatttgaacgatgcaaatcttcagccattgcagctggtactgcgttcaatcctggtgcagaatactccacagccgggaatgattgcagatatccaaagcacagcagagatggcaaaggtagcagaacagttgaaatatgcaacaattgtagtatcaagtttaccacttttagtgatgtatccatttttccagaaatattttgataaaggaattatggttggatcggtaaaaggctaaagaaaggaatgatacagatatgaagaaaaacagagtaagaagtttgcttgcacttggactttctttaacaatgatggtaagtataatggggtgtggaaaacagcagaggcttgatgctgagcttaatccggatacaccggtatcggatgtacagtttccattgaaagaaacagaggagctttcttttattaccagtgcaccggccacttcaacacaggatccaaataaaagagtgattttccagagaatggaagaacagacaaatgttcatattgactggacctgctttgtatcagatcagttttcagataaaaagaatctggcgttggctcagtttggaaatctgccggatggactgtttaatgcaggcatgagtgattatgatctgttgcgttatgcaaagcagggaataattattccgctggaaaatctgattgacaaatatatgccaaaccttcaggctgtgtttgaaaaatacccggaatacagaaccatgtgtacagcaccggatggacatatttactcttttccgtggattgaacagcttggttccggaaaagaagcaattcaggccattggagatattccttatattaataagaaatggcttgattatcttggtcttgagattccaacaacaacagatgaactggagcaggtactgattcaatttcgagatcatgcagatgatctgaaacaagagttttccattgaaggtgatgtaataccgatgtcatttattatcaataacggagatcaggatccttcaatcttaataaatggattcggagatggttatggggacacaggagatcattttgctgtaacagatgaaggtaaggtgatttatacaacggttcaggaaggatacaaagaaggtatcaaatggctgcataaacttgtgacagagaatctgatcgatccggaagcatttacacaggaatggtctacttatgttgcaaaaggaaagaatcaccgttatggactttgcttcacatgggatattgctaatatagacaacaatacggattatgtgatgcttccggcactgaccggaccggatggaatgagaaatatcaccagacagaacaacagtgagaccagcggttttgacagaggaagatgtgtgcttactaccagctgccgtaacacggcacttgctgccgcatggatcgatcagatgtatgcaccccttcagtctccgcaaaataactggggaacctatggagagaaggattcctttaatatttttgagctgtctgtaaacaaagatggcgaaaaaatgttaaagcatatggacttaggagatcagtcaccggtggaagtacgtgaagcgcaatctgtaaatggtcctctcgctatattaaatgaatattatgacgtatatgtaacacagccggaagatgcgaaatggcgtctggataatatgcatgagacatatttacaggatatgaacagcaaatatgtttatcctaatgtatttatgagtattgatgatacaaacaaagtgtcacagtatgatacagatattaagaaatatgcagaacagaagaaagcagattggatcctgaacggaggaattgatgaagaatgggattcttatctgaaaaaaatggagaagtacgggctttccgattacctttcgatcaagcaaaaatattttgaccagtatcaggattcattaagcagtgaaaaataagagaagatatcattttgacaggaggaactatatgagcgaaatgttggaaaaggcaagaaaatatgaatttatacagggacagcagatcaaagaggaagaaagaccagcctttcatataactccttatgttggctggatgaatgatccaaatggattttcctattataaaggagagtatcatttgttctaccagtataatccgtatagcacacattgggacagtatgcactggggacatgtagtgagtaaggatttattgcattggaactatgttccgactgcattggcaccggatgaagattatgataaattcggctgtttttcaggaagtgccatagaattagaggatggcagacagttgcttatgtatacttctgtaaatcaggagaaactggaagacggaactgtaagggatattcagacacaggcagtggcagttggagatggtaaggattatgaaaagtatgataagaatccggttctgacagccaaagatcttccaaagggggctagtaaagtagactttcgtgatcccaaaatctggaaagggaacgatggaaacttttattgtgttataggaagtcgtccggctgatggaagcggacagatccttctttacagaagtaaaaatggctttgaatgggaatttgtaagcattctggcaaagaatcaaaatcgttatggaaaaatgtgggaatgcccggatttctttgaattggacggcaaatatgtgcttctgacaagtccacaggatatgcttccggaaggattagaatttcataatggaaatggaacgttatgtattattggggagttggatcctgagacacatactttaaaggaacagttttgtcaaggtgttgattacggaattgactattacgcaatgcagacactgcttgcaccggatggacgaagaattatgatcgcctggatgcagaactgggatacgcttgcatatcgatgcaatgactctggatggttcgcacaaatgagtcttccaagagaactgtctgttaaaaacggaagattgtatcaggttccgatcagagaacttaatgccatgcgtgcaaacaaagtcgagtataacaatgttgtgataaaagataccaggctcacactggatcagattgaaggacgaattgtagatctggaacttgtgatacgaccggcagataaagacaatctttataaaaaatttgaactctgttttgcagagaatgagaaatatcattctacattatgcttccgtccggatgaatctgttttaaaaatcgatagaaaattctcaggaagcgaacgggcgctggttcatcagagcagttgtctggtaaacggtgacagcaatgaactaaaactgcgtgtgattttggataagtttagtgtggaagtatttattaatgacggcgagcaggttatgtctgcggttattcttacaaagcaggaagcaaaggggatttctttctttgctgatggtgcagctaagcttgatatagtgaaatatgatttattataataaagcgttctaaatgggacataatatagcatttattggtaaggttggtaatgatttttttggagatcagttgagagcagccataaaagaagcaggaattgatgacattggcttatgtacagatgaaaaaattcatactacgcttgctatggtacatacatatccggatggagatagggatttttccttctatcgtaatccgggagcagacatgatgctgaataaaactgagatttccgaggatattctcaaggaaacagaaatgcaaataagtaaaaaactttaaatttgtaattcttgccaaatagcaaggaaatcgcaagaccttggtcatgtgaatttccttgcttttttttctcaaagtgtcaggtaaggcccttgtttatggaagaaatcagctctgccagttgtttccttttggtgcgtgtatcaccgttgatcatcaacttggaataaatctggttgacatattgttttacagtgccttcagagagaaataacctctctgcgatttcgcggttgctcagacggtcggtgatcaaagctgcgatttctgcttctctgctgttcagcacattcaggatctcaggcctggaattacggctggacaggcggaggcagtgttgttcataaacagaaccaagggaaaggatccggtctgtgaaaggctctggtgttatggaattaatactgcccagcacgtccttgatataggtataattttctacaaacggaatcagaaagccatccggcatggcgtgtcctaaggctttctgcagaagctgtcgtgcatcatgatgtttgcccagcattgcgtaagctgcagcagtctggatctgaacgtggagagacacaagttcatagtgcattttctcacagaagggcagaagcgtttcgcttctgcctataacttttgcgtacattttctgtgaaagaaagacctgattttcgatcatttccatcataggtctgcagggagaaagaaagctgacagtggataacatatggtctttaaataatgcaggaatcttttccggcattccggtcaatgcatagtaataagcataagtactgtcaaaaatattcagccacatcatattgtggagagacagaagctccttatactttacttcagggttcttcacaaaggtgacactctcctgaaaaagggaaagccttgcagcaaggaaatcacagcagagcgaaatattgtgctgtccgtttgatgcaatggtggaataagtctgctccagcagaatctgtgcatctgaaaaattcccctgcataaatgctgcctctgcattcatgagcaattccgcaccctgtccatgtccctgggtaatcctgtaatagtggggcatacattcattcatagctgtcagttctgcatccagggttccggatctgcggtgaaacatcatcagaacagaaggagaaccgaaggtccagcttcctgttttgcggatactgatggcaggtctggtcattttagaactggcctgacggtgcagaacgctcataccggtgatatcgttatacatcagaaaactcataataagatcacattctccggagagattctttcgctcatcttcggacaaagtgttatcttcagctatggtatctgtcagaagctgcttcagttccagcattttgggaatctgatgccaggtaaacatacggcgcattaatacgagaagggccagaggcctgttcttcaggatttctgttggacagacatcaagaaatgcgagaaccttttccggcgaaagagaagccaggaggattcctgcatccttttggataacagcaagtgctgcatcatagttaagagccttgttataggcagcaagtgcctgcagaaactgtccccgggattcataccattgtccgtaacgattccggaaatctgtctgtttttcatgggaaagcatggcaaaggcacgctgtgtacattccttcatcatatggtgaaaacggaagctgactccatcgggcaaaggagtgataaaagcattctgtctggtcataagggaaagaatctgtccggctttcggattccctgtaataaaaagagccatctcaacggtaaattcatctgcaagtcccataacagtgagaaattcctgctgcgcatcagaaaggggtgcgatcatggcagaggaaaacatatcataaatgttagaagtatggtcgggaaagtgtccgttttcaaaaaaggtacagagattcagatagactgcagagaaccatccctcactggaatagagaagcgtgttcagctgatcttcgttcaggctggcaccgcagcgatgggtatagacagaaagctcccggcgattcagacacagatccctggtatggatctgatataactttttgccaagacggagaatctcttttccggacagaaaagcatttctgccggatacgatcaggtggatattctcaggcagtctgttggcaagcatacaaaaaaatctgcaacatgaggttcacccagcagatgaaaatcatcaataaaaatgtagtaagaggtctgactgctcagggaataacaaagctcatcagcaagcatcccggcaccggcagcatctgaagggtagctataattatccagaaaatcaagccctgcgaaggcaaatgccttctgaacgctctgccagaaaacagacagattatcagaataaatactgatccggatcacacaggaatttccgtttttgctctgtttgtccagataccagttgatagcagttgtttttccatatcccatgggagcggtcacagcagtgaatgcagattgtgaaatcggcttcagattctcctgcagacgctcagagatgtaaattgtattcagattatatttctttttagacatctgtaaaacctctcatttgatacgatatgttttattttagcatacaaagtatcaaaatgaaactttttcccaggcggtttttcaggcaatatcggacactgcttttgctatacggggacactttttggttccaggttccttctgaaacgtttctctatcagataattcgtatggaaccttcaaaagtctatgattatgtaattacattttacttgaaaaattaaacaacatatgataaattgtaaatgcgacgtaaaaaaagtcacatttataaaaaggtgattagtatgagagaatttttggaaaaaacattacggcaaaatgtaataatgacagagaataaagaggtatataaaaaacttccattagcatatcgtggaagatatgacatttttacagtagagactaatggtgtattatggatggctattcatcccaaagatgatatcggacttgttgttttgcgtagagacagagctggcgtggaaaaaataacaggattaaactgtgcagtttttcttgatcgaacaacattttatataaaagaaaagatgatagaagaaggaattccttttgtaatagataggaagcaggtatttctcccgtttattggatatttgctgagtaaaggaaatgaaagagagctggcaccagttcatttgatttcatttttgacgcaaaaaatgcttctaatggccatttatgaacgatggaatgaagtaaaagtatctgatgcggcgaaacgattggaagtgtcaacaaaatctgcaagccggtgttttgacgaactggaatatttaaatattgatgtgttgggtatgaaaggtaaatcaagagtcatcgatattccggatgaacgagaacaattatggcagcagattaagatggtattaagaaatccggtaattcgaagatttattttgagagaagatataaaatttgaaaagaaagcaggtatttctgctttatgtgagtattctcttttgtccgataatgtttatcctacttatgccgtgacgaagaaagaactaaaagatagtggagtgaaagcggaaaaacaagtgagtgaattggaagaaattggctgtgttgtcttggaactgggatattttattgattttctgggaaaaggatttcaagatcctttaagcgtagtactgtcactgacaggagatgaacaagaagaggaacgagttgatatttctattaatgagatgttggaggaatatgtatggtcaaaggattagatacattttggaagtactttgcagattatgaagaacagtatgttttaataggtggcgcagcctgcgatattctttttgagagcaatgaagtgaatttcagggctacaagagatctggatatggttttgattgttgaagcattaactccagagtttggagagaaattttggaagtttatcgttgatggaaaatatagaaataaagcaacaaatggtagtaaccctcaattctataggtttgataaaccagaagaagataaatttccgaaaatgatcgaattgttttgtagaagcgattttgaacttaaaagcgcggaaggaattacaccgatacatattgatgatgaagtatccagtttatcagcaattcttttgaatgatgattactataaggcacttcttaatggaaaagttataagaaatggactttctgttctaagaccagaatatataatacttttcaaggcaaaagcgtatcttgatttgaaaagtcgaaaagatttaggtgaaaaagtggattccagtgacataaagaagcataaaaaagatattttgcgtattgcatcggaacttatgcttgaaaaagtagaaggattgccgattgcagtaggtaatgatatacatagttttattgacttgctggagcaggaaccatttgatcaaaattcattgaagagatatggactgaaaaatgaggatattatggaattgttaaagaaagtattcgtattaaaatgatcaggaaatccacgaagatacggtatttgccatgcgcaatcatctgttgatgcagcaggatatgaaaatacatagtaataatgctcaaaaacagaagatacatttttagtaaaaaacgcttttgaaatcaaagtaaaatggctttataataaaaataagggcgagtagcgtaatgagtcggaaaacaacagttatgctgcttgtttttataaaatgaatctcaggaggaattgcatatgcatgagtatgaaatctttattgaggatataaatccgtgtggaggagaacagtacagtaaaaaaactttgatcgaggcagaagcagccagcccggaagcttatgtaaaagaaaatggaagatttccgattctggaatccacacgcaacgagagtggagatgttgtaatagtaacaggagacaatcagggttcttttgtacgttatacttttacggaataagaatgtcggtcagcaaggagtggattttgtgaaatatgaaattggagactttgtcagcaaaccagttacaggtatctgtaaaatagaaaatattttatatttgaatccgcaggatgaaaaaaacgataagttatattatctgatgaaaccagtagaagatgaaaaggaaaaaatatatgttcctgtttcaagctcagattcaagactgagattatgtctgacaaaagaagaagcctggaatctgatcaaacgaattccggatatcccgacagcatggacaaacaatgaaaaaatgagggaacaaaattataaagaagcagtaagagcaaatgaccctgaggcattagttgctattataaaaatgatttatcagcggaagcagaaaagacttgcacaagggaaaaaatgtactgctacagattcaaggtatttccagatagcagaaaatctgttatatatggaactgggagttgcacttgaaaagccaaaacaggaaatctgtaaaacgattattgattacatcgatcaaaataaaatagattgatatgcattataaaaaatattttgtttgacttttaaaaaaacaggaaatataatgataacgaacgagtagcagatgagcgtaaatccagtttcatgctactcgtttttcttttgttaaaatagaatatttgccatgaaaaagtgtgtagcctgtcagcgtaagtccagcttatgtgacagggtgcgcactttttttgtgcagaaaagagaggagttaaagtaaaatggcagaaaacaacaaaatgaaggatatgccggtgaataagctgatgatccagatgggaatccctatgatcttatccatggcattgcaggcggtctataacattgtagacagtgcgtttgtaggaaatatgagagtaggcagtgaagctgcattaaatgccctcactctggtatttccggttcagatgcttatggtagcggcaggaatcggaacaggtgtaggaaccaatgcacttcttgcaaggacacttggacagggaaacagggaaaaggctgcaaaggtagcaggaaacagtctgttcctgggtgtgatcatttacgtggtctgtttactgtttggtatctttggggtgaaagcatatatttcatcacagacagttgatgcagaagtacttgaaatgggagtcagttatctgcggatatgctgtgtgatttcttttggtattattttcttttctttatttgaaaagctattacaggcaacaggtcgttctctttattctacaatcggacaggtggttggtgctgttgtaaatattattctcgatccaatcatgatctacggtattggaccttgccctgaaatgggagtgaaaggtgcagcttacgcaactgtaattggtcaggttgcttctgctgtattgctgcttatttttcatatgaaactgaacagggaattcgggcatgggccgaaatacatgaaaccgaatgctggtgttataaaagaaatctatgcaatcggacttccggcaattattgcgcaggctctgatgtccattatggtttatgtgatgaatctgatcctgaagttcaatccatcagcacagacagcctatggattgttctataaagtccagcagtttgttctcttccttgcttttggtctgcgagatgcgatcactccgatcattgcatttgcttatggaatgagaagcaaaaagagaattcaggatggtatcaaatatggaattatttataccattgcattaatgattctgggaattgcaattacggagattttccccagagcgtttgcaatgctgtttaatgcaggacagtcaagagaatattttattgccgcgatgagagtgatttcagtgagtttcttgtttgccggaattaatgttgcttatcagggaatttaccaggcattggatggcggcctggaatcactggtgatttcacttttgagacagctgattattatcttgccactggcgggaatcttttctctgtttgtcagaaatggtcagatgggagtttcgttgatctggtgggcatttccaattactgaaataatttcatgttttgtgggatatgtatttttaaagaaaatcagaaaaaatagggttgatgttttaaactaggaggaatcagagatggcaaaaagaattattacgatcagcagggaatttggaagcggtggacgttttatcggagaagaagtggcaaagaaactcggaattgcctattatgataaaaatatcattggtcagattgcagaaaagtccggcttatcaccggaatatattcaggaaaatgcggaattatctccgaaaaaaggtttgttcgcatatgcattttccggtcgtgatatcacaggaaaatctgtggaggacatggtgtatgaggcacagagaaatattattttaggattggctgagaaggagccttgtgtgatcattggaagaaatgcagactatatactgaaagaccgggacgatgtgctgaatgtatttattcatggggacatgccggaaaaaataaagcgtatcactggtttatacaatgtaaaagagaaggaagctgtgaaaatgatggcagacacagataaaaggcgaagaacaaattataacttttacacagatcagaactggggaaaagccagcaattacacactgtgcctgaacagctcacagcttggatatgacagatgtgagatgataattatggaatgcgtgaaataaaaacagattatgttttttattcaaattgactgagtggaagattcctttttctatgtagtgtatctgtaaaataaaagaggcagatataatgaaaaggaataaaccagcttgtatcattcaggtaagagttaagtgatggaaacatttcagataataatagttactttgcgcattttgtgttataattgagattaacaggaaatgataaatatctgcaaaatgaatgtttatcaggaacttaccggaggacattttagttaagacgtaatagatttcggactttgtaaaatgcaaaagggagatcaatgatatgagaaaaaaaacagttcaaacaagcagtaccaaaagcaatgcaaagagtaatacaaagagcaatgcaaagagtaatacaaagagtaacacaaagagcaatgcaagaaacagcgtaaaaagcagtgtaaaaagcagtgtaaaaagcagtgcaaaaaacagtcctcaaaaagctgttaagaatgttgctccaacagtagagaatgtttctgttaagcaagccgtaattattcaggagccatctgttgaacagaatgaacagaatattccaacgagacagcctgatctgggaccgcgaagaagtgtagccttcattggatcagaatgttatccatttgttaagaccggcggattgggagatgtaatgtctgccctgccaaagagtctggcaaaattgaacattgatgttaaggtcattattccaagatacaaatgtattcctcagaaatttcaggaaaagatggaatacaggggttcctttgatatgaatctctgctctgatggaaagcagtattatgtgggaattatggaatatcaggaggatggggttgtctatgattttatagataatgatgagttcttctcctggggaaatccatatacgaatctcatagatgacattccgaaattctgttattttgcaaaagctgcccttgctgcccttaattatctgaactggactcctgatgtagtacattgtcatgactggcaggcagctttagtaccactttatctgagaacctgttttcaggatacagatgtaggacgtgcaatttcagtactcacaatacataatctgaagttccagggtatttatgacagaaaaaagattcaatactggtcaggacttccggattatgtatttaataaggactgcatgatccagaactggctggatgccaatatgttaaagggtggcatcgcttacagcaataaagttacaactgtaagtaacacctatgcctgggagattcagacagaggaatatggagagggacttgcagagcatttaagatatcacaacaataagattttgggaattgtgaatggtattgatacggatatctggaatcctgcaactgataagctgttagctgctgattatgatgagaagtcagcgataaagaataaaaagattaataaaaaagctcttcaggaatctctggggctggatgtagatgagcataagatggtaatcggacttatttcacgtctcaccaaccagaaaggtcttgatcttgtaaatgacgtaatcccgggaattatggatgaacatacgcaggtggttgttcttggtactggtgattctcagtatgaaaatacattccgctattatgaaaacaaatataaaggcaatttctgtgcatatattgcttacaatgaaaatgtggctcacaatatttatgcaggatgtgatgcacttctggttccatcaagatttgaaccatgtggacttacacagcttatagccatgagatatggtgcagttccgattgtaagagagaccggaggactcaaagatacggttcagccttataatatgtttgagaatataggaaacggttttacatttgacagatatgaaagcgggctgctttacgatgcaatcaacagagcaaagacgctctatttcgagaacagaaaatcctgggatgatatggtgatccgcgatatgaataaagatgtttcctgggaaaagagtgcaaaacagtacaaagatatgtatgtaggattaacaccaagagattagtgtgccgacaatatgctcaggcgtatatttcgaaaacgatgtactggtctttccaaatggttacgcagtgcgtaacaaattgagacaaatctggttgataaaccagataaaagtggtatactgaacacagaagaaaagaaaccgtgtggaattacagttttgtttcacacggttttttagaaaattaaggttagataaaactaacatatataatagcgatttactggacaatgtaaagaggacggatttctatgaaaatattggtttatggtgcaggtgtgatttgaggaaaacaacatgaaaaacaaagaatacaaaaaactgtcaattgctgaatttacaaaagcagcaggaagatatgaaagtaaccatgcgggtatttacgaaatgtgtaagaaggactatccggatattttggaagaattagagaaagagccatttagagatttattggacgctggatgtggaccggctccgatgatttctttattagcagaaaaatatccagaccgacattatacaggtctggatttggctccggccatgattgaacaggcaaaaaagaaaaacatttcaaatgcaacgtttgttgtaggagactgtgagaactttccttttgaaaatgattcatttgatgcaattatttgttctatgagttttcatcattatccggatccacaggaattttttgacagtgtaaaaagatgtcttcgcccaaatggaagattgatcctgcgggatgtgaccagtgacaataaagtattggtatggctgatgaatacattggaaatgcctctggcaaatatatgcggacatggagatgttcgggttccaacaagaaatgtggtcatgaaatgctgcagaaaagtaggattaaaagtagaaaaatttgaaatccgcaaaggtatgaggatgcattgtgttgtcagaaaagcctgaaggagaccggttatgaaattttatgaaagtggagacaatcgtaaacctgtgatatttttatttcccggtacctgttgcctgtatagtagctttgatcatgtactggatgggttacattcttatttttatacggtagcagtttcttatgatggatttgatccaaacgagaaaacagaattttattcgatggaagatgaatgtgaaaaaattgagcaggaaatcagaacaaagtatggtgggagaattaaagcagcgtatggatgttcccttggaggaagttttgtatcccttctgattcagcggaaaagaatccatataaatcatggcatcattgggagcagtgatatggatgaagcaggtaatcttgtggcaaaaattcaggcatccatggtagtgcctttcatgtataaaatggtacatacaggtgctcttccgaaatttatgcagaaaaagcttaacaagacagacggggctaagaaagaattatataatggatttttaaatatgtttggaatcggtaaaggaggaagtccgtggattacaaaacagagtatttataatcagttctattcggatctggttacaaaagtccagcatggaattgatgtgccgggaacaacaatccacgtgttttacgcaacaaaaatgggaaaaaaatatgaaaagagatattgtacttatttcaaaaatccggacattcaaagacacaacatgcagcatgaagaattgttttgctgtcatagtgcagagtgggtggaagaagtaagaaaggcagtggaaggcgacaaacaatgaaagaaaaagtgaatgtgacaggtgtaccggaaacgatggtacagaccctgtatgcaagagcaaaagaaacaaaaaaacacaatgcaaagatcaaggatgaaattgccgtagaacttgtggaaaggcttgattatgacttttccagagcagataaagatagtgccatgacttatggtgtgattgcaaggacaattgtattagaccggatggtcagaaaatatttggagaagcatgaaaatacagttgtcgtaaatattgcatgcggactggataccagatgctaccggatgaagggaaaatatatgcgctggtataatgtagaccttccggaaacaatgaaaataaggagccagttccttaccgaaactgatccggtgtatcagattgcaaagtctgcaatagatgattcctacatagatgatatcgattatcacggtaagaatattctggtaataatcgaaggacttacaatgtatttgtatgagaaagatatcaggaagatgttttctattattgataaatcatttcagaaagttacagtaatggtcgaaaccatgtcaccctttgttgtaaagcatatgaaagagaaatccatagagggaagcaatgcaaaattcacatggggagttaagaacagaaaggagctgcaaagaatcataccggcattttctgttcggcaggaagtcagtcttgttgaaggaatgaaagagcttatgcctgtttattatgtaataggtaagattccggctgttcggaatatctcaaataaaataatagttttggagaaacatagctgatattaagggaggagatgatacagatgaagaaaaggcattttgatgtggaatcagatggattttatggtgcatactggaaatgtaaaacaggctcagactgtgcaatgattgcgatgatcggggatgatccggaggattatctggcgcgtacatccgtgaaatggttacataaactcggtgtgaacgtgatgacgatgtcgccggcaaaaaaggattatggacatcataattatccgctggaacgtatagagaaagcaatcagttggttaaaaatacatggtaatcagaagataggaattgtcggggcatctactacaggaacacttgcattgactgccgcttcttattttaaggatatcacattgacgataggtctgacaccgagtgactttatctggcagggatttatgcagggtaaaagagatggttgtaaggaatggccaatggagggagaatctcttttttcgtataaaggagaaccacttccatacatgccgttttgttacaaacatccggattactggcatgtgattgagaaagaaacaaaacggaccggtgatatgatcaattcaagaaaactatttgatgattctgaaaaggctcacccaatcacagaagacgagatgatcaagattgaaaaaatccatggaacagtattgttaattggtgctgaagatgatgtgttgtgggatactgcaaaatatatccgccgtatgaagcagcgtatgaaagaacattcacacacatgcagattggattatgtcatttatgagcatggaacccatttcgtttttccggagagcatgctaaagacaatgctcccggttggatccggactctttgtaaaactggcatttcaggcagcaagaaaacatccgaaagaatgtcgcagagcacgtctggatattgactggcgggtaagaaatgctgttgcaaaatggaagagagtagatagataaaaaatagacagaaggtggaagtgtggtatttaaaacaacaggaaataaatcaaatccagtcattctgtttttccatgcaatgggagtaactggggaaagcagtatgccggttgcagagaaaatggcagaaaaatattattgcattatgccaacatcgactgtgtattgctccggacagaggtatcaaagcaaaagagatgagatacaacagattgtacgatttttggggaaccatggaatcaaagaaatagaacttatagttgcatcttcgattggagcagatctcgccatggcattcctgacagagataaaaataccggtaaagcatgttttttttgatggcgggcagtttgcacagattggaaaggcaacacgcagaatcatggttccgctcttatatatagcaatgaaaagtttatattggtcaaaaggaaaaacactaaagagaatcatgtggtgtgacgatgataaaattaaaccttattttatagaggcaggaaagaacttgacgtatggaaatctgaggagacagctgacagacagtttggaagataagccattttcagaactgtcagaagaattgcagaaacatacattctgggaatttggaagtatagaagaacattttaaatacagaaatgcagtgatgcagacttatatatacggtaactttccggtttttgagggattcaaccatatgcagtatcaaattcaaaatccggagggatttgccagaatgctcgaaacaattattgagactgaccgattaccggaattggcatttgcgatgtggtatagaggaaaatagttatgaaaaatgcttatgagcttgctgaaaatatattgaagtccaaacctgataagaatatagaattaaaatcatcagattcttttgccagtattgagttatatggtacatcagcttgcaaaaaggtacaggatacggaattctgtgaatgttttcatttggaaaatgagagcggtacaggaatgattacattgtatcatgtgtttccaggaattgatctggtttataatgatatgcatatggagtattgcaacaaggagcaaaagccggcttccagtgtgatggaaataaactattgcatggaaggccgttgcgaatgcgtgtttgaacaaaatgaatatggttatatagcggcaggagacttgtcattttgttctttgaaaaaaactgggcatgtgtcagagtttccaacatcgcgttatcatggaattaccattacgcttgacttttccatgattacagacgaaatgaaaaggatactgcaattattgtctgtaaatctggaaaagattagtaacatttcaaaaacacatagttttactattatacgggcaaatcagtcaatagaacatatctttttggaattgtataaagttcctgaagaaatcagatatggttacattcgtgtgaaaattctggaactattattagtattaactggatttgatttaaagaaaaataattctgagcatgtatatttttcggatgtacagattgatgcaataaagcaggttcatgcgtttctaaaggggcactatagggggcattatacgattgaagaattgtcagtgcgttttaaaatgtcaccaactgttttgaaaaaatgctttaagggtgtatacggaaattctgtgtacgcttatatgaaaaagtacaggctgcagatggcggaacgccttttaaaagaaaataaacttacgatcggggagatagcattacaaattggctatcagaatccgaacaaatttacatctgcatttcgtacagaatacggtatgacaccaacggaataccgtaagaaaaagacacaggaaagtctgaatggatagaaaaagagtctgtttagtaattgagattctatatggaaatctataaaatatgcgttgtagttagaaaaatctaactgcaacgatttttaatttaaggaggcatctcatgaagcagaaaaaacttttaacattatttttaacagttgcaacgtcattttcaatgttagttgcttgtagtaacgctacatttgcagaaagtacaggtacggcaactgttacagaaagtacaaatacgacggacaagaaacagaaagcagatgaaaatcaggatgctgcaaaacaacttttggttgatttgacgggttcatatcaggaactatggccggtaattcttgatgaaaaatatcagcagatctggattgatgattgtacagagttggttggtgaggaaaatgcggaggcagcatatgataagttagcatccatggtttcaggaacaatttatggagaagaagcagtagaagcatacaaagatggcgatggtgtttatgactgctcttttaaagaaggtgtaaataagctggaatttgatggttctgattcagtgatcaagggatatgattcagaaggaaaagaaatcttttcccatacatatcattatgttggaatagaagaagtacgtgggttatacgaatttaaaagtgacgatgcagactcaggcgaatttacttatttctgcatagcaccagatacaaatgatacaacctatcatattgaattgcgctacggcagcgatttggaggcacttggaaaatatgatgaaggagactatgcatactggcttggctcaggtatttcaacagactatgatcagacaatggttgagaactgtatagaacttttctgcaaagaaaatctgtctgaatagaacagacttgtaaaactgcagaaagcatctgcggagtggaaactgaatacacgaggaaaataaaaaattgaaacaccaagacttgacaaattcctgtaatgagttaaaatataacagtgctatatagcgctgttatatttttgaaaagaagtttagaggatacgaaaagaatgtcgacgaaagcagaagatacacagaaaaacatattagatacagccagaaaacatttcctgaaagatggtttgacaggagcatctttaagaaatattgtaaaagatgcagggcttactactggagcattttacaaatattatccgacgaaagaggcactttttgatgcactgacggatccttatatggaacatatttatcagatttatgaccagatcgttgaggagtttgaaaagctttctgccagtgatcagacaaggaatatgtcggatacatccagcgatgggatggagcaaatggttgattatatctatgatcattatgataatttcagattattgttgaaatgcggagacagtggaaaatttgaattattcatacacaatatggtggagcgggaaatgaagtccagcctgaaatatatggaaaaaatgaaggaagccggtgtaaaaataccggttgtagaggaaagccttatgcatatgatctatacgggatttttttcatcagtatttcagatcattgagcatgatatagacagggagactgcaaagaaaaatgtacatcaactgaaagaatttaatacaggtggctgggaacgattgtggaatattgaatttccagtataactgatgcaggaattccgaataggttatgtgtgttgcaggttctggatttctgaataaagttcagacaggataataatatcaggtggttgatgccagtaaaccacctattttattatatgttggttagcgcaaactaacagaaggtaaaacaataaaacgaaacaataaaacgaacgtaaggagtgaacagatgtgaaagaaaaaaagaagtcggcagtcagctggatcctgacgtgggccggacaaaaaagaattgcctatgtgtggagtgtgttacttgcaataggaaatgtgatttttaagattttgccgtattttattattgcagatgtagtaaagctgtttttaaatggtgaaaaggagtttgaaatatatcttgcaaaagcggttctgattgcattatcgtttatcattgcagaactgcttcattcactttcgacagcattgtcacataaagcaacgtttgcagtacttgcaaatataagaaaatcctgctgtgataagctggcgcgggtacctcttggctatgtgaaagacacaccttccggtacattaaaaaatattatggtggaaagaatcgacagtatcgaaacaacactggcgcatattgtcccggaattcacgtccaatctgctggcaccgattgtgattttgatctatttcttcctgacagactggagactggcactctggtcattggtgccggttatagtgggatttctttcctattttggaatgatgctggattataaaccaagcttcgagagaacggttcagacaacaaaagatctgaatgatgcggcagtggaatatattgacggaatcgaagtgatcaaggcatttggaaagacagaaagttcttatgcaaaatttacaaaggcggctatggcttatgcagattcctttatttcctggatgaaacggtgctcgatctttcatggactgatgatggtggtcacaccttatacgcttcttacggtattgccgtttggggcacattatgtagccaatggaacacttgctatttcagattttgtcatctgcattattttatcacttggaatcgttggaccgttgatcacagtgggttcctatacagatgatcttggcaagatcggagtgattgttggtgaagtggcaggaattctggaacagctggagcttgaacgtccagagaaaagtaaaagtgttccaaaagataacttcgttactcttgaagatgtcagatttggttatcacgacaaagaaatcctgcacggagtaactatggagctaaaagcaggaacggtaaatgcaatcgtaggaccttccggaagcggcaagtcgaccatcgcaaagctgattgcgtccctgtgggatgtggattccggaagcatcaaaatcggtggagttgatgtcaaagaactggcatttgcagattttaatcggaaaattgcatatgttgcacaggacaattatctgtttaatgaaacagtccgtgaaaatatcagacagggaaatccggaggctacagatgaacagatcatcgaggtgacaaagaaaagtggatgctatgaatttatcatgcagttggagaatggatttgatacggttgtaggaggtgcaggaggacatctgtcaggtggcgagaggcagcgtatctccattgcaagagcaatgttaaaggatgctccaatcgtgatccttgatgaggcaactgcctacacagatccggaaaatgaggcaattctgcagaattctatcgcaaaactggtagcagggaagaccctgatcgtaatagcacacagactttctactgttaaggacagtgaccaaatctttgttgtaaatgatggaaatgtaacagcacatggcacacatgaggaacttttggtgtcatacccgctttatgaggaaatgtggaatgcccatatttctgtaaaagatacggtgaaggagggagaatgatatgtttggaattctggcaaaattctttcgtttttcaggcaaagaaaatggaaataaatttaaactgtcgatggtgatcggactcatagaggctcttgcttcagcgatgaagattccggctattatgtacatattgattggtttgctgagtggaaaaccaataggaaaatatattggcggttctattgcgattatggttattgcaatcatagtcgatgttatctgcaagagatattcaactgtgcttcagacagaaggtggatataatgcaagtgcttttatgagaatcaagattgcagagcatctgcgctatctgccgatgggatattttaatgctaacagtatcggggaaatttcttctgttacgaccaatacaatggaaatgcttggcgatgtagctgcaagagtggttatgctgaccatgcagggaattctggaaacatcaatgatcattcttatgctgtttctttttgactggagaatcggattgagcgctgcagcaggagtacttattttctttggggtcaattctgtgatgcagaatgcagggaaaaaagattcagagcaaaaagtggtatgtgatacagagcttgtaaaccagatcatggagtatctgcagggaatatcagaagttaaatcatataacttgcttgggaaacaggcaaaaagattaaacgatgcaaatgaagcatgcgaaaaggtcaatacaaagatggagatgttgtttgttccctatcattttctgcaaagcgtgataacaaaaatcacaggtgctgtgatcgtagcaggcagcgcatatttttatatcaatggaaccatgagcgcggtctatgcgatcggtatgacaatctcggcatttatgctttattccagcctggaatgcgcaggaaattattcatcccttttacatgtggtaagtgtatgtgtagataaagcaaatgcaatactggagctggacaccatggatatcgacggcaaagagattcagccggagaattacgacatcagactttctaatgttacgttttcctatgacaaacggaagatcattgacgatgtatcgctctctatcccacaaaaaacgacgacagcaattgttggatcatctggtggaggaaaatcaacactttgcaatctgatcgccaggttttgggatgtggattccggggaagtgacgcttggaggcgtgaatgtaaaagactacagcatgaacagtctgatgagtaatttctcatttgtatttcagtcagtgtatttgtttgcagataccattgagaataatattaaattcggacgtcaggatgctagtcatgaggaagtggtggaagcggcaaagaaagcgtgctgtcacgatttcatcagcaaacttccggatggatatgacacagtaatcggagaaggcggcgccacactttccggtggtgagaaacagcgtatttccatagccagggcaattatgaaggatgcaccaatcgttatattagatgaagcaacggccaatgttgatccggagaatgaaaaggagctgatggatgcagtagatgcacttacaaaggaaaaaacgattattatgattgcccacagattaaaaacggtcagacatgcagatcagattgtggttgttgacaaaggaaaaattgtgcagcagggaacacatgagcagctaatgaagcaggaaggtatctataagagatttgtggatgcaaggcagcaggcggtaagctggaaactggcgcgctgagaaataatacacagttggggaatatccaaaagcactgaaaaccgttggattattggttttacagtgctttttcagcacaaactaattatccacttacgtcttttaaagacaattaacgatacagcaagcctgaataattcctccgtggtaagcaatgtatacacaccaacaattccccacttgaatacatatgctgcaagcagacacagtggaattccgatacaccatgtgccaacaatatcaatgatcataatgattttggtgttaccgccacttcttataatgcctccgccaagtatcatattttccactttgaccggagcatacaaggcaaatacgataagcagtgtctttccaagctcttttacgctgtcatcaacacgatataatccggtatatactccagccaaaagaatgagtaaagccgataccgttaccgcaccaatcaccactgaaaaaatcagtgaaaaattaccgcataatccaactgctgatatatttgtctcgcctaactgtccgatcatgatctggtcaacaattgaaaatgatgcctgcagcatactttgcaatgtgacaggaattgctattttacacaacaatttcataaattttgacattataatttcctcgtactttccctttttactaaatcaaccggtaacacgatttctgtcttatattctgctccatcgcgcattgcctccagacattcaattgccgctttcgcccttaagtttgcttcctgatgaatcgttgtgagggaaggattactttccctgcttgccatgttatcatcaaagccgataatctggatatcctctggaatctgaatgttctttccttgtaaaaacttcataaactcaagtgcataaaaatcggacactgcaaaaacagcggtaacattgctttttaacagctgtatatatttatcctcgtaaaagcacattctttccctttctgtctttggtatctcccatctatatgtttctcctggttcaaaggctttgcgaaacccttcgatgcgttctttatccatgcagatgaaattatctgctatgcataatgcttttttatgtcccagttcctttaaatatttcccggcctgatagccgccgttataatgatcgatgaccagatttactacctttgagcatttttcaaaatagccatcatacactacaaacgaaatccgcatctgatttctgaggctttcatagtcagcttcacaaaatccaatcagaatcagtccatccatattccacatggatgcaaataccggaatctctctgatatcagatgtcgtttttatcatcagaaaatatcctttttcattaacctcatgggaaagagcattcagcgatgacatcacaaatccatcctctaaaaccctgccctcatacttttcatggtcattcaccaccactccgatgattcttgaattatttctcgcaagcaaaatgccagccatattcgggatatatccagacctttcaagttcctgttggacgcgttttaccgtctcatctgaaatcttttctgttttgccgtgaatcacttttgagacagtagcagtactaagacctaacgcatctgcaacatctacgattctaactctgttctgtgtcatttccattccttcttctgcgatattatgattatatggtacattataaatgtggaatttacaaagattaagcgcataacctgttacaaaatttgcattcgatttttgtgaatttttactattatattacacattttcagcaatctgaatacacatgaaagagtacttatggacataaaaatgacaggggatttttttaccgtgaagtaaagattcaattatgggttaatcattaagggcattcttatcttaatatacaagacaaaaagtaaaatataattgacattatggaaaagaagtgttactttataaatggaggtgaacataaagtggcaaaaaatattgcgataaaagtggcaagggctgaaaaagatatgacgcaaaaggtcttagcagaagctgttggtgtttcaaggcaaactataaatgctatcgaaaagggagaatataatcccacaataaaactgtgttgtaaaatttgtcgcgtattagataaacgtttagatgatttattctgggaggatgaagaggatgaaaattaggaagatgaaaagtaatttagatgaacgtcaggaactaaaacttcttaaaatcgaacataatggatgttggattgctttttggggattgctgattgtaatggcaatacaaatgatagtggggaatgacagtattaagaatcttgccggagaaggggctgtacttatgagtcttgccttttatcttttggttgcatgtatccgaaatggaatctgggacaggagattgaaaccgaatttcaagacgaatgtcatagtcagtagtattgcggcagtgttgacaggaattatatggtttagtgtttcctatcggaattaccataaacttattggttcaattgcaaccggaattattatgtttgtgcaggtggaaatcttatgtttattagcattaatgatattttctaaaatatataaaagaagagtacagaaacttgaggaagatgagtgatatatgaagtagaagatattaatgatatctggaaatgataaatcattgggaaatggtttatggaaagggggcgaaaaatgacagaaaacagttacaagacgccctgtggctgcatccattattttgtaaatataataaataaacagagaattacgttagtgttcttaccgggacttacgtcagaccataggctttttgagaagcagacagaatattttgagaataaacagaatgtgtttgtatgggatgcaccatcacatgcattatccagaccatttacgaataattacggcctgtctgatatggcagaatggctttatgaaattttagcaaaagaagaaatttataatccaatcattatcggtcagtctatgggtggatatctggcccaaatgtatatggaattatatccggataagataacggggtttatctccattgattctgcaccgcttcaaaagtcttatatgactgcaatggaaatatggcttcttgaaagagtagagccattatacagaatatatccatggaaagctcttcttagggctggttcaagagggtgctctgagacggactatggtcagaatcttatgcgaaagatgatgatggcctatgactcagagcataaagaatatgcaaggctcgctggcttcgggtacagaatgcttgctgaggcaattaaagcagatttgccatatcatatcagttgtccggcattacttatctgtggagaaaaggataaagcgggatctgcaaaaagttataataagaaatggcatcagagggaaggtttatcgcttaaatggataaagaatgccggtcataattccaatactgaccagccggatgaagtaaacagacttatagaaaaatttatcagcgagatagataggaaaggagtgcccggatgaaattaaatatacagtggaaaaaagtattatatggaattgcattgatagtcattagtataatattggctgctctgcattttattgtggctggaaaaggtatcggatattttacttctggcattattgcagttatatcggtatctacttgggattcaagcgtgagttttccaaacttatcggattcttggtagttgccttagtagccgttggtcttgtattcaatacgtccggcgtaaaagacgtattgttacagttattcaataagattattggagcgtaaatttagtattgttattgtgcggacatttgcatataataaagataaaagcgttcaaatggagaacagtgattccgaaggagggcttgtagattatattatgacagatgaaaaaatcaaaaattccagtgagctggagtttgctgttttttgtattgaaaatgtagcggcaaagctgggtgtgaatgcagagcgtgtttatcaggcatttaccgaacagagtaatattttgaacggctatattgtgccggaatatgaaatgttgcatacccagagcagggaatatattgttgatgacctccttgatgtgatgaaagaaaggggtgtagaagtatgattctctatcatggttcttttttagagattgctaagccagatttagctcattcccgccccaatgtggatttcgggcgtggcttttatgccacgccgctatatgaacaggctgcaaagtggtgcggcaagttcaaacgtcgtgggaaagacggtattatttcccggtatgaatacgatgaaagccgggaatctgaactgaaaatgctgaaattcgattcttattccgaagaatggctggattttattttgaactgccgcagcgggaaagattcgaccgattacgacctggttgtgggtggtgttgccaatgataaggtgttcaatactgtggagctgttctttgacgggctgattgataagacggaagctatcaaccgcctgcgttatgaaaagccgaatctgcaaataagtttccgcacagaaaaagcattgtctttattgcattttgaagggagtgaaacattatgacagcgaatccgattttgcttcagaaaaaatatagccgtgttattgaatgctttgctaaacagcaggggctctcgctggatgcggcattggatttcttttatcattcccaggtttatcagctgattcgtgacggtgtttctgatatgcactgcatgagcgatgcatatttggcagaggaactggaacaagaatatgccgggaaagtgcctgtaaatgtggtagtaaaggatatgatttaaagcagtctttcatttatgatcgactgcttttttcatactcaaaattaaaaagaaaggattgaattacgatggaagagaaacttccttttgctggcgacattgtaaggacaacttctgtcaggcgattaaacaagctgtactttgcttatatgaatttatcgccagaagttcagcaggcttataaagagttgattctctattgtggcggtgttgaggatttattgcagaaatcagaaatctcacagtatgagcttgtgtttcataaggacgataactggaagattgtaggataaaatcgcttatttgcttaacaccatttttagttgtattacatctatctttatttcttccttatacttcggacagtacagcggaaactttacgagaacagtatcgtcatatacttttgttctcgtttttcctccgcaaatcgggcaatggatccaaagagagttttttcgattgtcattcactctttacacctccaataatggcatagctccgcgttgatcgtccggcttttgcctatttatagtatattccaaaagagccaatggactacaatttctcatagttcatcagctctgtgactgtgtgtcaggctctttgataactattttttcttattgttcttccatgttttgtatataacattggaaacaggaagtaaaacacatatagctacaaaccaacctggaaaatgtggcataatctcaatcctccttatcttatacaagattgaatatagccgctgcaatgcagatagcagcaatgataagtgatacaataattcgtaaaatggaaaaactatacaatttttctggattttgcgtgtcataacgcacggtaatggttgttccaatctgtgacgccattggtatttgtatgcagttttgggactgatacgtttctccattcactttatacgaaacggtcgcccattttgaattacgaaattttgagttttctggatttattgttttgaaagaaataatcgtaccgacggtttgtgccgttttgtttccttttaataaaaattgaatacagtttatcaatccaaaacacgatgctatcacagcaatgacataaagaaaaatagtatctctatccatagtctcaccttctttctttatcacgccaagtctgccttatcgtaaatctttatagacaaagatgctgatattgctaaaattgcaaaaccaataaggacaataccgccataaacaaggtatggggaaaacatagagaggaagtttaagtttagacctcctgctctcataaacagtggtagaataaatggcgaagccataataatcaccccaaatgcaaactttgttttttcatatccaaacttatactgtattggtaaataaataccaataaaaacagatacaataagaaacataaatgcaaacagctttatatctgatgttcctaatccgggcataaacaaggtttcaagttcaaaaacgatacaacagattgcatatatagccatgcaaaaaatgtattttgatgaaactattgctttccgtgaaaatggtgtggcacatagtaatgtcgcagcttttggaaattgatactcttttagggatacatattgcaacagcatgaaaacgccaaaaatgacagaaagaataaatccaaaaactcccgtaaactccggtgtccgccaacgcatgacaggtgggataagtgcaataactacaagcataatcagcacatatttttttacaatcagaaaatccttttttagcagggcgaacaacatcacttttcacctccgatatttccaagcataatatcctcaatcgtcggacgctcaaccataatgttgggaatataagaccgtacttcggatatttgttttgtaattcctgtaaatccaaaatcagtttcagatatagataaaaaaagcttgcgagcatcagttgttaaagctccgctatcacctttgactatccgatatgtgtcaagcaaggtatccttttcctctcgaaagacgatacgcccgttatcaatcataatgagcatatcggcaatcttatcaaggtcagaggtgatatgtgtcgaaaagaaaacacctttgccgccattttccatgtactcagttaagattttcaaaagctgccccctaactaaaggatcaagtccgcttgtcggctcatccataatcaaaagttctgcgttatgagaaagagctaaagcaagagcatacttcattctcatacctttggaaaggctattgattttttgcttcgggtcaagcgaaaacatatccatgtaccgcttaaaatcctgttcagaccatgaagtgtacgcagatgaaataattactttcatttcacccagcgaaagttcttcgtaaaatcccccgccgtctaaaactataccaatacggtctttgatttctctttcattcttatccatgtcaagaccgaaaaactgaattttgccggatagcttgttcgtcagacctaaaagcgtccgcagcgttgttgttttacctgctccattgacaccaataaaacctgtgatacacccctctggcaaagagaatgtcacatctttcaaagaaaaatcgccatacgacttatttaaaccgctgactgtcaaaatatcattcatttcaatcctcctcgtaaagaatatccatcatggaattaagttcctccttactgattttcagtgattttgctgtttgtatcatatctgccattttttgttctacaagacgtcgcttggagtcgcggagtaattcaagattgcttgtagatacaaatgtcccaattcctacttgacttacaataaatccctcctgttctaactcctcatatacccgtcgaattgttaagacgctcactttcaaatcattagcaaaagcccgaatagagggaagtgcgttcccttcaaccaattcttcttttaatatggcgtccttaatctggtcttttatttgttggtataagggagtgtcagaagtatttgagattagtattttcacaaagcctctcgcccctttcttttgatgtgatgtaactacatatacattataaacaacaagcacattattgtcaatataatactgaaaacaaacagatagagaggaattacaggatttttctttactctcttttggcaaatggggctttccgttgtagtagataacaagggataaaactttcatagcaagcataggaaatgagtacccacttccgtattttgccctgcaaaattgcttgttgggaagtgtcccaaaccctcgatacgaaaggagtgcttggataaaattaaatatacagtgaataaaagtattatatggaattgcattgataactattggtaaaaatgtggtcaaatcaagaaaaacgagtgcgaaagcaagtgaaaaatccctgtgaagcccgtaaaatcaaggcttcacaaattcttcaaaaaaattagcactcacctcttgacagtgctaacaacatgtgttatattacatgcagaacaaagaaaacaacatatttctccctcgggagagatatttctcatataagaggagggttagcctatgaatatcagtaaatttacacagaaatccgtacaggctgtccaggatctggagaaggttgcttatcagtttggcaaccaggagattgaagaggagcatcttttatatgctctgctggaacaggaagacagcctgattcttaaactgatcgagaagatggagatagataaggattatttcagaaattctctgaatcaggcactggatgccagggttaaggtatctggcggtgagcttcgtttcggacagtatctgaacaaggctctggtcagtgcagaggatgaagccaaggcaatgggtgatgaatatgtctctgtagagcatttattccttgctttgttgagatatccaagtccaagcatgaagaaactgtttcaggaatttggcattactaaggagcgtttcctgcaggcactttctacagtacgaggcaatcagcgtgtagtcagtgacaatccggaagctacttatgatactttgaataaatatggcgaggatttagtcgaaaaggcacgtaaccagaagctggatcctgtgatcggacgtgatgaagaaatccgtaatatcatcagaatcctttcacgtaagaccaagaacaatcctgtgcttatcggtgagcctggtgtaggtaaaacagcagcaatcgagggtcttgcacagcgaatcgtggcagaggatgtgccggaaggtctgaaggataagaagatttttgccctggacatgggtgctctggtagcaggtgccaaatacagaggtgagtttgaggaacgtctgaaagcagtccttgaagaagtaaagaagagtgaaggaaacattattcttttcattgatgagttacatctgattgttggtgcaggtaagacagacggagctatggatgccagcaatatgctgaaacctatgcttgccagaggtgagcttcactgtatcggtgccacaactctggatgagtatcgtcagtatattgagaaagatgccgctctggaacgtcgtttccagcctgttatggtagatgaacctacagtggaggataccatttccatccttcgtggtctgaaggagagatatgaggtcttccatggtgttaagatcacagacagtgcgctggttgcagcagctacactttcacatagatatatcacagaccgttttcttcctgataaggccattgacctggtggatgaggcctgtgccctgatcaagacagagctggattccatgccttcagagctggatgaacagcgccgtaagatcatgcagctggagattgaggaatctgcactgaagaaagagacagataacctgagtaaggaacgtctggaagcacttcagaaggagctggcagagcttcgtgatacctttaatacacagaaagcacagtgggataatgagaagcattctgtagagaaattacagaagcttcgtgagcagatcgaggatgtaaataagcagatccagaaagcaaaacagaactatgatctggagaaggctgcacagttacagtacggcgaacttccgaaattacagcagcagctggaaatcgaagaaaagagtgtgaaagaaagtgacagaagtctggttcatgaggcagttactgatgatgagatcgcaaggattatttccagatggaccggtattcctgtaacaagactgacagaaggcgagagagccaaactcctcactctggaagatcagcttcacaagagagttgtaggtcaggatgaaggtgtgaagagggttacagatgcaatccttcgttccaaagccggcatcaaggatccgaccaaacctatcggttccttcctgttccttggtccgacaggtgtaggtaagacagagcttgccaaaactctggcagagaatctgtttgatgatgaacagaatatggtcagaattgatatgagtgaatacatggagaagtattctgtatccagactgatcggagcgcctccgggatatgtaggatatgaggagggcggccagcttactgaggcagtccgccgtaaaccatacagtgttgtacttttcgatgagattgagaaggcacatccggatgtgtttaacgtactgctgcaggtactggatgatggccgtatcacagattctcagggacgtacagttgactttaagaatacaattcttatcatgacttccaacatcggttctccgtatctgctggatggtattgatgagaatggtgagatcaaacctgaggctcagagtcaggttatggatgacctgagaggccatttccgtccggaattcctgaaccgtctggatgaaataattatgtttaagcccttgacaaaatccaatattggtaagatagtagacttgatggtcggcgagcttgacaaacgtcttgcagaccaggagctttccctggaactgacagatacagccaaggatcaggttattgagaatggctatgacccggtatatggtgcacgtccgttgaagcgctatttgcagaaatatgtagagactcttgcggcgagaaagattttgtccggagatgttcacgcaggtgatactctggtgctggatgttcagaatggggaattcattgttacggtaaaggacggaaactaaatgatacccaaagatccaatgattctgctgagttatgtgaatactcagctcagggattactatgattccctggaagcactctgcacatgcagaggattgaagaaagacgaactggtggcgaagatgcattccatcgattatgagtatgatgaggcaaccaatcagttcatataagaaatatgcgaaatgctctctgacagcgggaattgctgttggggagcatttttcgtattgcatataagaaagctccctgctttaattgcccaaaagtgataaactgcggagcagttattgggtcatgtgtttcaaaatcagtacaattttaaaaaatagataaggcggcacaaaaaaatgtcagtaataaagattaaatcgttaaaatataaacgaaaataatcaggaaatatgtaaaaaatgtataaaaaaacaggaaataaagtataaatattcactatccacacaattgatttttgtatgctgtatgatataattgcatctgtaaaaaacaagcgcatattaaataggaagaaacacgtatatgaaaaaaatctcctgaatgataatcgcgctgtacgaaaatacaatatggaggtggcagttttgaaaaagttggtgaccgtactgggtgctttttttgcagttcttctggcttgtccattgagtgtatttgcggcagaaggcagtaaagcaccatctacagtacctgtatggctttgcattccctttgcagggcttttgttatgtattgcagtgatgcctctggtgaaagcggagtggtgggagtctcatcagccactggttgttgccttatggatcattctgatggtggttccatttgctttcgtttatggagccggaaagactgcagagacagttctggactgtattgtgaatgattatcttacattcatcattctgttattcggcctgttctgcgtatcaggtaatattaccatggagggtgatttcgcaggttccccccgtgttaatgtaggtctgcttgcactgggaactcttctggcaagctgtatcggtaccaccggtgccagtatgctgatggtacgtccggtaattaaaatgaattcatggagaaagagaaaaggacatattatgatcttctttatcttcatgatttccaatatgggtggatgtcttaccccgattggagatccgccgctgttaatgggatttatgcgaggtgttccattcttctggagcctgcatctgttccctgtactgatctttaatatggtcattctgctgtttgtattttatcagattgataaacgttcctacagaaaagatattgcaaatggccgtaaaccggatatccgtaaaccgggtactcagtttcgtctggatggactgcacaatatcattttccttgtgatgatcgttggcgcggtaattttaagcggtgtacttccgggaatgtccgcattccaggatgctgcaggcaatgtaagaggcattcatctctttggagaagtaaccctgacattcccggctctgattgaaatcgtgatcattctgcttgctgcttttctttcctttaagacaacagataagcagatccgtatcaggaaccattttacctggggtgcgatccaggaggttgcggttttattcatcggtatttttatcaccatgcagcctgcattgatgcttctgaaagctgtaggaccgaatctgggagttactgaaccggcagagatgttctgggcaacaggtgcactttccagtttcctggataacacacctacttatctggtattccttacaacagccggaacgctggcatttacaaatggaatcacaaccacactgggaacagtacctaccaagattctgtctgccatttcctgtggtgcggtattcatgggtgccaacacttatatcggaaatgccccgaactttatggtaaaggcaatctctgatgagaacggtgtgaagatgccgtcattcttcggatatatgctctggtctgtggcatttctgattccggtgtttgttattgatatgtttgtattctttttataaggagggaggatcattatgcaggataatcaggaaaaatgtaaagaacttgcaatacgcatttataacctggacgaagaagtttataaatgtgtgggttcctctctgggacgtacatttacaggacaaaaagaaacaactctccgtcatctggcagcactgatgtataccaagccggacggacatctgctcagaagtgaactggcgctgatcagtaacatggcccgtaccatcagggataagagcgagagaagacgtcttatgatagagtatgacagtattctgaaagagattgaaagtcttccggatacatttggacagacagatattgtagataaagaacgtatcagtctgaataatctgatcgcaagacgccagaatgagatttccgaaaatgatcatctgatcatctgtatcagccgtacacagggaagtggcggtaatgatatcggatttgaactggcggatcagcttcagatcaactattatgatgcagaaatttttgatcaggttatgaagcgtctgcaggcagacaaaaatgcagtcagtgatactggtaattttgaagggtttgataaatacagaaagaaaaaacacacagatctgaaaacctggttcagggaattcaatcgttatcatggacttccgaagcaggacgcagtatttttcaatatgagtgatctgatctgtgaactggcaaagagtgaagactgcgtgatcatgggacgttgcgcagatgcgattcttaagaataatcatattcctcatatcagtctgtttatcagtgctccgttccaggttcgtgtgcagcacgttatggatatccgtaatatgaatctgaaacaggcagtacgttttctgaagcagatggataagcagcataagaaatattatgaattttataccggtgagaaatggggaaaaccggagaattatgatttgtgtatcaacagtgccaactatggactgaaggatacaattgagctgatccggagaatgctggatcagaaggttcactgatcagagggagatttatctgtctgatttaaccgaatcaagtaaatagcggagcggattgcgaatatccgcctgacaaagaaaataagctctgtggataaaagaaaaatccacggagcttatttttttgccaagtccaggcagatatttgtaagcagcaaagcaatctgggaatgcccggcgcttgctgtaaacgactttgattttaacgccagttgaatgtactcataccataaacatagataaaggcaatcataatcggaagtacaaaccggaagagtggtttcatccacttctgtacttttaagcccttaccggtattgctctctttgataaagttatcccatccccagccgaacttattacagcagaagagtgcaaggatgagagagccaaggggtaaaatattgttggaaacaataaaatcccagaaatcaagccaggtagttccttcggcaaatggctggaagtggaaaacgctgaaaccaagggctgtggtaagtgccagaagaaagacacctgtgccgcagaccacgctgccttttggacgggaccagccggtaagctcacgtatcattgccaggatgttttcgcacactcccagaactgttgacatagctgcaaataccatgaacaggaagaataaggaaccccagatgcgacctccggacatgttgttaaaaactgctgccattgtatcaaacagaaggctcggacctgcatttacttccagatcaaaggtaaagcatgcagggaaaataataactcctgccagaaaagcaaccagtgtgtccagtgtgatcacatgaatagcttcccccattagagaatgctctttaccaatatagctgccaaagatagccatgccacccatacctgtagataaagtaaagaatgcctggttcattgcccctacaattaccgaaccatcgatcttcgagaaatccggtttcagataaaaggtcattccctcaccagagcctttcagaaaaagactgtgtacagcgagagcaagcatcagtaccagcagtgcagacatcatatattttgtcacacgctccagccctccctgaagattgaaggaaaggatgaaaaatgcaatgactacagtgaccagtaagaagaatacattcacagagggagaggagatcatggctgaaaatcccagtgaaccatttttacctctgagaaactgtacaaaataataaatgatccagccgcagacaacagtgtaaaatgccatcagggcaatgttgccaagcagacagaaccaaccgaaaatcccccatttctgtcctggcttttccagcttacggtacatgaaaaggggacttgtctgagccgctcttccgatggaaaattccaacacaagagccgggattcccaggatgaccagacacagaagatagatcagcataaagctgccaccgccattttgcccgcacatccacgggaatttccacacatttccgcagccaatggcgcagccggcggaaagcataatgaagccaagccggcttccaagctgttcacgtttcataagataacgctcccttcagaagttcatataagggatattataagataaaaaacaatatttgtaaaattgattgttttgttgtatattattgaaaatatcgtttgtataagaaaaataacgcttctgcgttttgatgggaaaatattgaaaaaaatatgggaaaggaacgagaaatggatacaaatgtgttaaaaacttttattgcagtatgtgaatattccggattttcggctgctgcaaaggaactgggatatacgcagtctacagtttcttcacagattaaacaactggaaaaggaacttgatgtcaggctgtttgaccgttattatcataaaatcaatcttacggaaaagggagttttagttttgcagcaggctcgaaacattctgaaggcacaggcaaaaatgctcgattcgctgaattcggctgaaagcattgaaggcgagattcggttgtctatgtccagttctgtctgcagcagatattttaaaaatgattttctgcgttttcatcatcagtatccggaaataaaagtggagataacagaaaacggtacagagcagatgtttgataaattgcggaagaacgaaacagatctggtttttactctggacaggcatatttatgattcggattttattatttgtgcggaacaggaagaacaggtacattttattgtagcggctgataatcctgttgcaggctgttcatggaaattaagtgaaatttctcagaatgagtttgtgttaacagaacaagccatgagctacagaaaaatactgaatgaaacccttgcgtcccaatcactggaaatccgtccggttcttgaaatcggaaatccgcttcagatatgtgaactggtaaaaaacagcagcctgctttcctttcttccggattttatttcggagaaatatgtgaaagacggacagattaaaagactggatgttgccggctgcccggtaactgtatggacacaattgctgctccacaaaaataaatggcggtctccggcaattaatgtgtttatagaattttataaagaagttatgcagagatagagcttgaagagtattggaaattttattcgacctgagatgaaaaaaattagccaggcaaaataaaattgaatatttacaaattggaaatatcaaagctaaatctaaaataattataaactgcacaaaaaacacttgcattttttgtctaaaagtatattatatatgattagtcaggctaattaaagaataatatcagacctgaaagaggacagaggccggaaaggagtgaagttatgtggtgcccggaagaggagaagaaagaaaaacgagaagagaaaagcatgcctgcgctctttatggagatcaaccgccaatatggtatgagatgtatgcagcgtatacgggaaatcggtatccaacagggacagatgccgatcattatgatcgtatacagacataacggctgcagccagaaggagattgcagagtggatgggtgtaacaccgcccactgtaaatgtaagtatccagcgtctggagaaagcagacattgtctgcaggaaacgtgatgataaagatcaacgcatcatgcgtgtatatctgacagaaaacggaagaaaaatcgtggaggagctccagcaggaaagcaaagcagtggagaaagtgatgttcagcaatttcagcgaagcagagctatgtcttttacgaaggttttttgggcagattctggataatatttcggagatacctgtcaacaggtagaaactgaaaaatacatgatggagcagattgagaaaactgtatcagcatgttcagataaaaaataatattgtctgtgaaagaactgacacgtgagtttaaacagacatacatattaaaaataggaaaagagggaatcaagcaatgattaaactgatgaaatatctgaagaaatcagcgggatacattgtcctgatcatagcacttctgtttctgcaggcgtactgtgatctttccctgccggattatacctccaagatcattaatgtaggtatccagcagaaaggtattgaagacagtgtgccggataagcttcgggattcaaccctgcagaatcttcagatttttatggatgaggatcagaaaaaggaagtttcacagaattatacacaggaagatgatacctggttattaaacgatgatatttccaaagaaaccagagagaatttaaatgaggatttctcaaaggcaatgatgatggtagctgccttttccgaagacagtgagcaggggcaggcaatggctgcacagatgggccttccggagggaacagacccgttgacagcactggcacagatgccggaagaagcagtacagcagattatgagtcagatggatgagaagctgaaagatatgccggagtctattgtgacacaggctggtgtttcctttgttgcttcagaatatgaagcactgggaaaagatgtggatgccattcagatgcattacatcctgatgtcaggtatcagaatgcttgccatggcactggtgatcatgctggcagcaatcagcgtcacatttatttcggccagagtggcaggcagacttggtcatgacctgagaaacagcatttaccgcaaggttatgagcttttccagcagagaatatcataaattctccacagcatccctgatcacacgaagcaccaatgatgtgcagcaggtacagcaggttatggcaatgatgttccgcattgttctgtacgcgccgatccttggtattggtggagtgctcaaggtattaaacacagattcttccatgacatggatccttggtgtggcagttggtctgatcctgattgtgatctttgtgctgttccaggtggcaatgccaaaattcactatcttacagactctgatcgacagactgaatctggtatcccgtgagattctgacaggtattcctgttatccgtgcattcagccgtgagaagcatgaggaagatcgttttgagaaagcaaacctggatctgacaaaaacaaacctgtttgtcaacagatgtatgacttttatgatgcccattatgatgctgatcatgaatggtgtatctgtacttattatttacagtggtgcccatgcagtagacaacggaaccatgcaggttggtaatgttatggcatttatccagtatgcaatgcagatcatcatgtccttcctgatgatcactgcaatgtctattatgctcccgagagcaaatgttgcagcgcttcgtattgatgaggttctgaaaacagaggtttctattcaggatccggaaactccggtacatccgtcagaaaatgtgaaaggtgagattgaatttgaccatgtatcctttgcttacccggaagcaggtgagaatgtactgacagacatttcctttaaagcaaagaaaggtcagacgatcgcagtgatcggaagtactggaagtggtaagagtaccctgatcaatctgattcccagatactatgatgtgacaaagggttctgttaaagtggatggtgtggatgtccgcgacatgactcagaaagaacttcgtgacaaactgggatatgtgccacagaagggtgtacttttctcaggtactattgattccaatatccgctatggtaagccggagatcactgatgcacaggtaaaagaagcagcagaggttgcacaggctacagaatttattgatacaaaaccggagaaatatgaatcccctgtatcacagggaggtaccaatgtttcgggcggacagaaacagcgtctgtccattgccagagccattgcaaaggatccggagatatttatctttgatgacagcttctctgctcttgactttaagactgacagtcagttaagaaaggcattgaaggagtacaccaaggatgcaactactgtgatcgttgcccagagaatcagtactatccttggtgcagaccagatcattgtactggacgacggacatatggcaggtattggaactcataaggaactgatggcaaattgtgaggtatatcagcagattgcaagatctcagttatcagaggaggaactggcatgagcgaacagagaagaagaggtcctatgggaggacatggacgtatgatgtccggcgaaaaggcgaaagacttcaagggctccatggctaagcttttccgttatatgggacgatataaattccgctttatactgatgtttatctttgcagtagcgggaactgtgtttagtattgtagggcctaagattttaggtaaggcgaccacagagctgtttaacggcctggttgccaaggtaaacggaaccggtgaaattgacttcggaaagatcgggatgatcctgttatggacacttggattatatgtgttaagtgcatgcttttcctttgtacagggattcgtaatgtccgggatctccaatgatgttacctataatctgagaaaagatatttcaaagaaaatcaacagactgcctctgaattattatgagagcagaacaaacggagagatcctctcccgtatcaccaatgatgtggacactctgcagatgagtctgaaccagagtctgacgcagctgatcacatcagtgacaactctgatcggtgtatttattatgatgctttccattaacgtgtggatgactttggcagcacttctgatcctgccggtttccatgttcatcatccagactgtcatgaagcattcccagaaatacttccaggatcagcagagctatctgggtaaagtaaacggtcagatcgaagagaacttcggcggtcataatgtggtcagagttttcaacaaagagaatgatgtagtagaggaatttgaaaaagacaatcagaagctttatgaatctgcatggaaatctcagttcttctcaggaatgatgatgcccatcatgcagtttgtaggtaaccttggatatgtaatggtagctctcttaggcggcgtgtttgtaatcaaaaaaagtattgaggttggtgatatccagtccttcttccagtacatccgtaactttacacagccaatccagcagatcgcacaggtcaccaacctgttacagtcctctgctgcagcttccgagcgtgtatttgaattcctggaggagccggaagagagccagaatgaaaagaatcctgtagatattaatacacttacaggagatgtacagtttgaacatgtaaaattcggttacaatccggataagatcattattaatgatttctctgcagatgtgaaggatggccagaagattgccattgtaggtcccacaggtgcaggaaagacaactatggtgaaactgcttatgagattctatgatctcaatggcggaagtattaaggtagacggttatgacatcaaagactttaacagaagcagtctgagagagatgtttggtatggtgcttcaggatacctggctgttctcaggaaccattatggaaaatatccgttacggacgtctggatgctacagatgaagaggtgatcgcagcagcaaaggcagcccatgtgcacaactttatcatgcagcagccgggaggctatgatatggttctggatgaagaaaccagtaatatttcccagggacagaaacagcttctcactattgccagggcaattcttgccaataataagatcctgatcctggatgaggcaacctcctctgtagataccagaaccgaagtgcgtatccagaaagccatggacaatctgatgaagggcagaaccagctttgtgatcgcacacagactttccaccatcaaggatgcagatctgatcctggttatgaaagacggtgacattatcgagcagggtaatcatgaagagcttctgtctaagaaaggcttctatgcagacctgtataacagtcagtttgagaataaggcaactgcctgaaatagaaaattacagtatggaaatcatgatataaatcatggtgtaaatctatggcaatttctgaaaaaatgaaattgctgtaagaaagaaatatattataaatccctcaggggtatttgtaaaagagaatatatccggctccaggctaatgcagatatttcttttgccaggcagatataggatcgcacagataccggctgagggatttttattattgttcactggcagcttcccacggatgcatagaaatagataaatcgagatataccgtgcaaatttacgtcttttctgtaagagggtaatatgttataattaaaaaccaatctatgaaaattgatatattttatcatcataataacaagagaaaatgataacaataataaggagtattgtagctgtgaagttactgaacagttgcaaatatcagaggatatcaacaatatgacagataagaaaaacggcagagaatatctgggctatgtgctggaaaaattaaaagaacgtatcacagaaatcagcctttctctggtggaaggccagaaagagattgagggaatgcatgagtattactgggaaaattatacagagatggaccagtatggttatgagaattatgataatcagcaggcattgttccgccagatttccgcaaatgaagagcagctgatcctgaaacagagatttcgcagaatggcagattctccattcttcggaagagtggatttcatttacgaaggagaggacgaaccggagatcttttatattggaattggaaattttgcagagaaagcagggcatattccattagtatacgactggcgtgctccggtaagcggtctgttttatgactatgacaaaggaccggcttcttatgaggctcccatgggtgaaatccatggcgaggttgcttcgaaatggcagtataagatccgcaacggaaaaatgatctacgaatttgagagtgatgtgaagatcgatgatgagatcctgaaagcagagctgggaagtaacggtgaggtacagcttaagaacattatccgtaccattcaaaaggagcagaatgccattatccgaaataccaaagacaggatcatggtgatccagggtgcggcaggaagcgggaaaacttccgtggcgcttcacaggatcgcctatcttctctaccatgacagacagaatctgaagtcttccaatattctgatcctgtcaccaaatggagtgttttccgattatatctcccatatccttcctgaactgggagaagagaatattaaggaaatgagctttgatctttttgcctataagcagcttcgggatacagtttctgactgtgaagaccgctatgatgaaattgaacgcagaatccgtttttcgcagaaagcttctcttgcagaggagaaacagtccatggaatttataaatcttatggaacgctatctggtggaactggaagaccggctgatgaattttaaagatgtggaatataagggatttgtaaagacagaatcagagattattgaactgttctattttaaattccaggattttccgcttctttcaagaatggatgcagtggcagattatttcattgacgaggtggaaaccctgaggaatcgtgatctggcggatgatgagaaagacctgatccgtgagaaattcatgaagctgtatgtgaccagagatctttatgtgatctacagtcagttcctgaaagaaaatggatacaaaggacttccgcgtgtttcttatgaaaaaagaaagctgaaatatgaggatgtttatcctgttctttacctgaaatatcgtttgcagagccagcagggaagaagcaatatcaagcatctggtggtagatgagatgcaggattactcaaggcttcagtatgaaattctgcagaggattttctcttgcagaatgacgatcctgggtgacagggcacagactatggatgataaacagcaggatgtgctgaaatttctgccgaagattttcgggagggatatccacaagatcattatgaataagagttaccgtaacaccatagagattgcgtcttatgcaaatcagcttgcgggtattgaagatatggaactctttgaacgtcatggtgctccggtggaggagaaaatatttgcagatatgagccatgctgcggaagagattgcagaaactctgaaactcggcgaagaagaatatgaaacagcagcggttgtcctgcgtacagagaaagaagcagaacatatgtggcttcttctgaaggaaattctgggagaaaaaggatttgatataaaagaacgtctgtcttatctggacagaaacagcacaagctttaagaaaggtcttacagttacgacattctatttggcaaaaggtctggaatttgatcaggtatttgcagtatttccgcagaaagaccagagcccgcttgtgcgtcaggcgagatatatcgctgcaacaagagcccttcatgaactgcatatgtatgaagtggaaaaataaaaaagtaatcgtatgtctcgggatagtggtgtgtgaacagtaacaagtaatctctcagttacagagaaaaaaagataaatggtatgatgaagcagaaaaatggcgttatgaaggactatgcaaatcgcagaaggctgagaaatcgacattgacatctatgtaatgaaattgtaaaatatataatgttaggggtaaaatatcttttgaccctgacatcatattttataaagtacggaacagttataataatatcagagagaggtttcctctcctgacctgatatcaaatattacctgaagactatatatctattctaaggaggatattatgaaaaataaaagagtactaatgttattggccttaacaactgtattatctgtttccatgactgcatgtaactttggaggcggcagtgacgaggattcaagtgtggtacaggtaactcctacaccggagccaaccaaagcagcgaaagcaactcctacccctgcaccggccaatgcccagaatactacctatacatctaagaacaaagcagtatccattaaacttccggatgcgacatgggcgaataaatcagattctgacgatatgttaagcttcgagtcaccgaaacagggcaaactcctgatcctgcatggttccggtgatgaggatatgtctgtggcgatcattccaagctcacaggatacagcctctgcacttgtaaaggcagataatcttgtagaaggtacagattttgaaatccaggattataaatcagaggaagtcagcggtgtaaatgtttacagctatacagttcattacctcactgacaagagtgactataaatatgttgtaaataaatatttcacagataatacaacagaattttacagtgttgcaggttctgtaaaggatgagaaagcactggcaggaatcaagacttctgttgattcattcactatttccggtgattctgtactgaaagcagcagcaacaggaaaaacttcaggaactacagcaggtacaactgcggacggcacttcaggaactacaggaacagcggctgcaggtacagacggaacagcatccggcagttcatcagatggaagttcttcagcaggcacagacggttcttacagtgatacttcatcgggcggttcatcagattacagttcatcagactatacttctgatggcagcagtgacggatcttatgattatgacgatggttcctccaatggatattatgcagacggaacacctgtaggaacagatgatccggactatgatacagatcagacaagaactatttacagaaactccgacggatatccgcttgtaatttatccgaacggtgacggtacatggtgtgatgatgacggaaatacctatgattttgctaatggtgaggacgtttatgatgagaacggcgttgactattactatcatggagaaccggcgtatgtccgctatatgcctaagaatcagtaacagaaaagttgaaaaggacggctgctgtaaaaaacagtcgtccttttttgcgctgacagagaccaacctgttatttacataagaacggatgttgtggtagaatagcagggaaaatatgtgttgctgtgaacggagtgaacagtaaaacaggtagataatgagggctgatgaatggaatcatatggaagatttgccggtgtttatgatgttttcatggataatgtaaactatcgtgaatgggcagactatattatagaaacactggctcaggacgggatcagggatggtctggttctggagttgggatgtggaacaggtactgtgacagagatgcttgcagatgccggatatgatatgatcggtatcgataattctgaggagatgcttgcagaggctatggagaagcgggcagaatccggtcatgatattctgtatcttttgcaggatatgcaggattttgagttatatggtacggttcgtgctgtgatcagtgtctgtgacagtatgaattatctgacggacgaggaagatctggagtatctttttgcactggtaaataattatctggatccgggcgggctgttcatttttgatatgaatacgatccataaataccgggatgtgatcggtgatacgactattgctgaggacagagaggacggaagctttatctgggagaacagttatgacagggaaaatgccctgaatgtatatgaactggcactttttcttccgagagaagacggattgtatgagaagtgtgaggaggaacatgtacagaaagcatattccatagaagcaatcaaggctatgattgtgaaagcaggaatggaactggtggcagtctgtgatgcatatactcataatccgggtgatgagaattgtgaacgtctgacttttgttgcaagagagcatggaaaaagtgcacagaacggatatcatggaaggattccggagaaacctgagacacatcgcgcggattgatgcgattatagcaggcctcttaattaatgtattatttacggggattgctattgatttgatgttaagccatggacaaaatgaaaataatatgaaagaaataacaggagtaataaacgaatgaacgattatattatcagagcaattgcagcgaatgatcagattcgggcatttgcggcagttactacagaaacagtagaaacagcgagacaggatcacaatacaagcccggtagccacagcagcactgggacgtcttcttacagcaggtgccatgatgggtaccatgatgaagggggataaggacatcctcacacttcagattaaggcaggaggtcctctggaaggaattactgtgacagcagattccaaaggtcgtgtaaagggatatgtgggaaatcctgatgtatgtatcccggcaaacagcaagggaaaactggatgttgcaggtgctgtcggtgtaggatttatgaacgtgatcaaggatatgggactgaaagagccttatgttggacaggttgcgcttcagaccagcgagatcgcagaagatcttacctattattttgctacaagtgaacaggtaccatcagcagttggtcttggagttcttatgaataaagacaatacagtacgtcaggctggcggatttatcgtgcagctgatgccgtttgcggaagaaagcacaattgcgaagcttgaggaaaatgtgcagaaaatcacatctgtcacaaatcttctggaagaggggcatactcctgagagtctgcttgagaaagttctggagggctttgacatggagatcaatgagaaagttcctacggaattttactgtaactgcagcagagaaagagtggagaaagccctgatcagcattggaagaaaagaactcaatgaaatgatccaggaaggtaagtccattgagatgaactgccatttctgtaataagaattatgaatttacagtggaagaactgaaagaaatcctgcgtaaatgtaaataagagatgccaatgtactgacagatggatctgccggagcacagagaagaagaggtagaaaatgaaaaacggttatatcaaaacagcagccgcaacaccttatatcacagttgcagactgcaatgccaatggaaatgagattatcagactgatccatgagatggaaaaagaacatgtgaaggttatgacttttccggagctttgtatcacaggctatacctgtcaggatcttttcctgcagagacgtcttctcgacagcgcctgggaaaccttgctgaagatcacaaaggaaactgctgatgtggatgcccttgtttttgtaggtgtgcctttcagaaatcatggaaaattatataatgtggcagcagttttaaacagaggcgagatcattggtctggttccgaaaacttatcttccaaactatggagaattttatgagcagcgccattttgcatcaggtcttggctgtctggaatatgtggatattgagggaaagagagttccttttggaacagatattctttttatctgtgaggaggagccggagcttgtggcagcagcagagatctgtgaggatttatgggtgacactgccgccaagcgttctccatgcacaggcaggagcgaatctgatcgtgaatctgtcagccagcaatgagatggtcggaaaggacagctaccgcagagatcttgtttccggacagtctgcacgtctggtgtgcggatatgtatatgcaaatgcaggagaaggtgagtctacacaggatctggtctttggcggtcagaatatgatcgcagagaatggagtgatccttgcagaaggaaaacgtttccacaatggtattgtatacagtgagattgatgtgcagaggctgaacgatgagagaagaagactgactacttatcagccggctgacgacagtgaccatattaaagtgagcttccatctgaatgtggaagagacaaaactgaccagaaaatattcgcagtatccttttgtaccttcacgaaaagaagaaagggatatgcgttgtgatgaaatcctgaatatccaggcaatgggacttaagaaacgtatggatcatatccattgccataaggcaacagtgggactttccggaggtctggattccacactggcactgcttgtgatcgcaagagcctttgacctttccggtgcggacagaaaggatatccactgtattaccatgccatgctttggaaccacagacagaacttatcagaatgcctgcaaattaagtcagtgtctgggtgcgactttaagtgagatcaatatcaaagaagcagtaaatgtacatttcagggatattgctcatgatccgtctgtgcatgatgtgacttatgagaacagccaggcaagagagagaacgcagatcctgatggacagtgcaaatcaggatggctcgattctggtgggaacaggagatctgtctgaactggctctgggatgggcaacctacaatggtgaccatatgtccatgtacggcgtgaatgcttcagtgccgaaaactctggtgcgtcatcttgtacgttattatgcggatacctgcaaagatgagaagctgacagaggttcttcttgatattctggatacaccggtaagtccggagcttctgccgcctaaggatggcaagatcgcacagaagacagaagatctggtgggaccttatgaacttcacgatttctatctgtactatatgcttcgtgcaggatttgaaccggagaaaatttacaggctggcatgtgagacttttgaaggaatgtatgataaggagacaatcttcaaatggctgaaaaccttctattggagattttttgcacagcagtttaaacgttcctgccttccggatggtccgaaggtgggaagcgttgcggtttcaccgagaggtgatctgagaatgccaagtgatgcaagtgcaggagtatggctggagcagcttgaaaatatggatatttagaatcgcatagcggagtggaggattttatccgcgagattttgcatggcgaagcggagaacgatcagttgttctccgcttttttcagtgctgtttcaattgcattcaaaagaatcatggaagtatacttttgatcttcggaatattggatattttccagcgactgggaggtatagatctggctggccagtgattccagagccggttccatgagaggaaacatggctgcggtgctttcgcttaaatttaccagacggatggaagttaccctgtcagagtcaacagttacttccaggtcaaaggtgttttcattcaggtcgatggaggaagtataaattcccggtttgtacaggcttttggcatcggctgaggcactttttttctgaccgggtccaaacatgaaaaaaagtacaatagccaggatgacagcaagaagaaggaaaatgccggtgtatataacttccttcatatgtaggactatgatttttgtttttgcactcatggtacacgcctcctggatggttttgtatattctattacagaagtgcttaaattatgatatactgaaacaacgaatgtgagtaaccgacagtaaggagagaagaatgtcattacagtttattatcggcagttccggtgccggaaagtcttattttgcatatgagagagtaatccgggagtccatggaacacccggagagaaattactatattattgttccggagcagtttaccatgcagacacagaagacgctggtggaaatgcacccgggaaaaggaatcctgaatattgacatcctgagctttgaacgtcttgcgtaccgtgtatttgaagaaaccggcggagataacagaaaggttctggaagatacgggaaaaagcatggtgctgcagaaaatggtgcagcagcacagaaaggaacttgcctatctgggaagtcagatgaataagccgggatatctggatgaggtgaagtctctggtttcagaatttatgcagtatgatatcagagaagagaatctggcagaaatgaaagagaaggcccaaaatcagccattacttgaaatgaagcttaaggatgtgggaatcctttatcagtcattcagggaattcctgaaggggcattatatgacaggggaagagatgatggatgtcctgcttaaacagcttcctttttccgaaaaacttaagggagcggaatttctctttgatggatttaccggattcacgccaattcaggtcaatgtgctcagggaacttctggtcattgctgaccgcataagtgttactgtgactatggacgaacgggaggatgctttttcttcgggaaaaccttatcagcttttctttatgagcaagcagatgatacggacacttgcagggctgaccagagatctggaggatccagtgtatctgaaaccatccggacagtcccggtttgcacaggcacctgccttacagtttctggagaaaaatatcttccgctacagaaagggcgtgtatgccgaagaacagcaggagataaaaatatttactgcgccatcccccctggaagaaatgcgggaggctgccagaaggatgtcagaacttgtgcgtacctgcggataccgctatggtgagattgcagtgatcacaggaaatctggaagaatatgcaagacttgcagcacaggtatttgaggaggcagatattccatattttattgacgagaagcattcggtaatgatgaatccttttgtggagtatctgcgcgctgccatggagatggcggtacagggatttccttatgagagtgttttccgttatctcagatgcgggatgtcagaagttaccagagaacaggctgataagctggagaattacgtgctggcgctgggaatccggggatataagaaatggtctgaaaaatgggttcgtgtatacagaggaatggaagcggagaagatacaggaactgaatgagatcagagaaatctttgcggaagaagtaagggaacttgcgcagggatttggttccgggaagaagacagtggaagagtactgccggattctctatgagtttatccaaaaaagcaatgtctggcagaaactgaaacgacaggagcgaaagtttaaagagtcaggcgataaagcaatggaaaaagaatataaccagatttatggaattgtgatggacctgctggataagatggttgagattcttggcgaagaaacggtaaacagacaggagttccgacagcttctggaatcaggactttctcaggcaaaagtagcgctgattccgccgagcatagatcaggtaatggtgggtgatatggaacgatcccgcttaaaggagattaaggcgttgttctttgttggcgtgaatgagggaaatatcccaaagagcacacagacaggcggaatcttatcagagcttgacagggatttcttccaggagcagggagtggaactggcaccggggcctaaagaactgatgaatatgcagaggttttatctgtatctgaatatgatgaaaccgggagaaaagctgatcctttcctacagtgatacaaatgcaaaaggagaaggtataagtccggcatatctgatcgggagtatacgcagtctgtatccgaagctggaaattgagggtggagccggggtcagaccccataaaaattctataaacaattattgttatccggaaaatccggaagcagggattgatctgtttctggagaagctggtacaggagacagagaaagaacatgaggatattctggagcaggcagatgagacggatgcaatgtttggagagctttacagctggtatctgcggaatccggaatacagaagcagagtacagaagctagtacagtcggcttttgccggaaaaccaaaggacattatcagccagagtgtggcgaaggcattatacggagaggtttcaccttacagtgctaccagactggaacgttttgcagcctgtgcatttgcacatttccttcagtatggaatgaagcttaccgagcgtgtggaatatgagtttaaacctatggatatgggaaatgttatgcatgaagcactggaaagctttgcagaagaagtgcgaaaaagaggcatgaaatggaaagagctgacagaacaggaacggaatgagattgcggaccggtgtctggataatattgtggcagattatggaaacacggtgctcaaaagcagtgccagaaatgaatatatgatcgagagaacaaggagaatcctcagaaggacggtatgggcacttcagaaacagctggaacagggagaatttcagccagaaggctttgaggtaaccttcgggggaggacggattgacagagtagatattatggaagatcagaataaggtgtatgtgaaggtgattgattataaaaccggaaatacatcctttgacctggtttatctgtatcatggcctgcagttacagctgatgatctatctggatggtgctctgcgtgtagagcagaagaaatatccggataaggagattattcctgcgggagttttctattacaatatcaaggatcctatgattcaggagaagatagatgcggatgtggaagcagtcagtgcaggtcttatgaaagaactgaagatgaatgggctggttcaggcagatccggagcttgtgtacaggatggacagcagtcttggctccattcctgtcgcatttaataaggacggaagctttcgcaaaaattcttctgtggcagacagaacacagttcgcagtgcttggacggtatgtaaggacgaagattgagaagataagaagttctattctggagggagatgcagaggtttctccctatgagctcggaaaaaagaatgcgtgtacttattgtccgtatatgacggtatgcggatttgaccgcaggctgtcaggatatgaattccgcagactgaaaaacttctctgatgaggaattatggaaagcatttgacagggaggcagaataagatgggcgtacagtggacaaaggagcagcaggaggttatacggctgcgggacagaaatattctggtcagtgcggcagccgggtccggaaaaacggcagtactggtagaacgtatcctgagtaagataacagataaagaacaccctgtggatattgacagactgctgatcatgacatttacaagagcggcagcaggtgaaatgaaagagaggatctcggcagctattgaaaaagcactctgtgaggatcccgataatgagcatctgcagagacagacaaccctgcttcatactgcacagattacaactattgatggtttctgtgcctatattatccggaattactttcatctgatcggactggatccgggatatcggacggcagatgagggggagctgaagcttctgcgaggagatgttgtgaaagcactgcttgaagaatattatgccaaaaaagatgaaaagtttcagaaatttgtggaatgctttgcaacaggaaagtcagatgaaaatctgggaaacctgatacagaaattatatgaaatgactatgagcaatccttttccgcaggaatggctgtccgggtgtatggatgattacaggattgattccctggaagagttaagagagactgagtggatgaggatgctctgggatgcagtgaaggatgaactgcaggaagcgaagcttctggtgcaggaggctcgaagaatctgctcagagccggatggtccgtatctgtatgatgaggcactgagcagtgatctgcttcttataagaagtctgcaggagctggcagagaaaagagattataatggaactgcagaaatacttatgaaaccctcatttgcccggctgagcacaaagaaggctgcggatgtagatgaacagaagaagcagagagtgaaagatctccgggatgaggaaaaggggattctgaaggaactggggcagcgatatttccagagtacagagaaggaacttctggaagtaatcagatatatcagaggccccgtagagatgttagtcgagctgaccgcaggatttaaagagcggttcggagaggcgaagagagaaaagaatattctggattttacggatatggaacattttgccctgcagatactgatgacgaaagaaggggaagaaatccatatgtctcaggctgcgagagagctctccgcaaagtatgatgaagtcctggtggatgaatatcaggacagtaacttagtgcaggagcttctgacaacagcagtatccgggtggatcaaccagaagaaaaatatcttcatggtaggagacgtaaagcagagtatctatcgtttccgtctggcaaggccggagcttttcatggaaaaatataaaagttattccacagaagaagcacaggagcagagaattgacctgcacaaaaatttccggagcagggaacaggttctggagagtgtaaactttattttccgacagatcatgggggaagacctgggagggattacctatgacaaagatgcggccctttatcccggagcttcttttccggaaggagagtcagaggaatttgtaaagacagaggttcttctggtcgagagagacggagaagaactgtctgatgtacaggactatgaagacgcaggtgcatcgggaaaccgcagggaaatggaaaatcagaccgggcaggaactggaggcgctggccattgcacagagaattaaagaaattgtgggaaaagaacatatcgtagataaagagacgaaggaataccggcctgtggaatacggggatattgtaatcctgctgcgcactgcctatggatgggcagaaaccttcagggaagtgctggcatctcaggggattcccgtatattgtacatcaagaaccggatatttctctgcaaccgagattgtgactgtattgaattatctgaaggtgtgtgacaatccgctgcaggatattccgcttatgggagtgcttcgttcaccgatcgtcggatgcacttcacaggaactggcagagcttagaatacagtatcctgatggtctgctctatgagagtgtttcggcatatgcaggagaaaatgaaatccccgaaaaagaactggatccggataagctgaaatctgaattgttaaacagtaatctgcgaacagatgaaaagaactctctgaatattaaattaaaaggatttctgagtctccttgaaaaggtaagaaatatggctacatatacgccggtccacgaattgatcctttatgtgctgaaagaaaccgggtatggagattatgcaagggcacttccgggaggggagcagcgttttgcaaatcttaccatgcttgtggagaaagctatggactatgagaagacaagctacaggggtctgtttaactttgttcgttatatcgaacagctacaggcatatcaggtagactatggagaagtcaatctgacaggagcgggcaataccgcagtggagatcatgacgatccacaagagtaagggacttgaatttccggtagtatttgtggccggtatgggaaaacagtttaattttcaggatatgaatgcaggtcttttgcttcatccggaactgggaataggggctgatgctatcataccggagaaacgggtgatcgcatcttcgctgaataagcaggtgatcagaagacagcttctgaaagagagtctgggagaggaactgagggtactttacgttgccatgacaagagcaaaagagaaactgatccttacaggaacagtcggaaagctggaaaagcagatgctgtcgctgtcgcgttttctggatgaggaagaagaactgctcccactgggaaccagaatgaaagcaaagaattactgggcttttgtactgcctgcactggtgcggcatcgggccatgagtgaacttctgtgggaatatggaatcctcatgaagaaacagccggggatttacgatgatatctctgagtttgtgataaaaaagatcactgtccgtcagatgacagaaaaggcagttctcatccaggcaggaaaccagatgcaggaggaatatctgaagaactgggatgaaaataaagtgtatgatgaggttgtgaaggaagagatagagaagagattttcctttgtatatccgtataaatatctggaagatattccggttaaagtcagtgtttcggatctgaaaaagagaagctggcatgatgaaagtgaactggaagagaatatcagtgtgtctgccgaagagcaggatgaagaacaggaagcgccggttcctgcatttatggcagagaagcaggaagagtataagggagctgccagaggtactgcttaccacagagtaatggaatgtctggattatgcagaagcagatacagaggaacagcttcgggctcagttaaagagacttctggagagccagaaaatgacagagcaggaagcggaatgtattcggatccgagatatcaggaggtttgtggagtccagactggggcagagaatgaagaaggctgccatgaaaaaacatctttacagagaacagccttttgtgatccagagaaatgcttctatgctcgatgatggttggaagaacgaaacagtgctggtgcagggaattatcgatgcctattttatggaagaggaagagattgttcttgtggactataaaacggatagagtgaggagaggacaggaacagaagctgatcgatctgtatcatgtgcagcttgaggattatgcccgggcattggagcggatgacggggaaaagagtgaaggaaaagatcatttattcgtttacattgaagaaagagatattgctgtaaacggaataaaaattattattgcgaattcaaatatccggcagggataagcgcgtgttatacgcgccaccctgccggatatttgtttttcaggatctggttgaccagtttaccgaagccaatgggatatccatctgcacagaggagatgccagccttttttgtgagctgcttcttcgggttcgatatttaaggtttcgccctttaaatatctggtgatcctttcgtcagaagcggagagagagatgactgcttctgattcatctttgcggatcgccagtgcaagtggctgagacggctcgaagcggtttttcttcaggtcaccgagatagagaccgtttcttaagaaggtgatgccgcggaagttgtgggcaaccgggggaagatagtaggctttatcaccacggatttccacacgttcccagtcaaatggctggccgcagagggttttcagaccgatttcgttcagaaattcctcaatcagtggaaatgcgtttttgtccggttttgtgtgaggacgggagctttccttgattgcctgtccttttttacggaagagcgcaaggaagtgtccctctccgttcattttgtgtgggaaaatccggatgcatttgattagctcaggatttccgtttccccattcaggaactccatgggagaagccttcataatcttccatttctgccagttccatgtcaggacgtttttccagaagccaggaaacagtgtgttcgtcttctgcaggcgcaaatgtgcatgtagagtaaagcatcagtccgccgggacggagcatatcggctgcctggaggataagctctttctggatttcggaaagctccatggatttttcgggagtccagtctttggcaagggcttcttctttacggaacattccttctccggagcatggagcatccaggatgatcttgtcaaagaattcggggaatgctttggttaactttgcaggtgtttcgtttgctacgaagacatttgggatgccgaagagttccaggttgcgaaggagggctctggcgcgggaagtgctgatatcgtttgctaccagaagtccctgtccctgaagtgctgcgcctgctgcagttgccttgccgcccggggctgcgcagaggtccaggactctgtcacccggctcgatggggatgcgggaggcgggggtcatggcgctgggttcctgaaggtagtagaggccggcctggtagtatgggcatctggaaggacggatgtcttcatcgtagaagtagccgtttttgatccatgggatctggcgggttggaaatggagacaggttttcgaagtcttcgcaggtgatcttggaggtgtttatgcgcaggccgtaggttcggggggcgctgaagctggagaggaatgcggggtattcgttgccgagcatttctttcattcgggtgaggaatgcggggtggaggtgtgttgtattttcgttcataatgggttgggttcctttgctgtagttttgattggtgggtgggggacgcgcaggaaaatatatctgtctgagtgcggtttcggcatctaaaatcttctaagccggtaaaaatctgctaaaagcatggagaaaaatgcaaaactcgctccgctgcaggcttcgctcagacaggttgcgatttttctccataacgcagatttctaccggctaagaagatctaagatgcctgcaaatgcactcagacagatatattttcctacgctgtttactgaaaataactgtagtataacgtgaggtttatgaaatattaagtttatgaaatactatagcaatgccataaaataatgcaatcaagacagttcagcaggacttcacgctatgatggactggattgtttgcagtaatttatgaaataagaaattgatatatagcaatgcttttaaatacattatttatgaggagtgctatagtaaaccggaagacgttaaggaggtattttcggtaaaggtatcaaaatgattataaagtataaatgatttttgctaaatagtattgacaaaatcatattatacatcatataatatcgttaacaaaacaatattgatgttctgtatagtatgtgaacaggatggaataaatgtatcagatgtgaaatggcgtttacctttggtatagtctggagcatttttcagacacgctctaaggctggattgcagagatgatgctgtctgtacagaacataattgaaacgagggagtgagcatatggtttttaatacgggtgctgcgcttctggatgcggttgttctggcggttgtttctaaggagaaggaagggacttacgggtataagatcacgcaggatgtgcgtggagttctggatgtttcggagtctactttgtatccggtgctcaggaggctgcagaaggatgattgtctggaggtttacgatatggcgtatgcaggacgtaaccggcgttattataagctgacggacagaggtgctgcgcagctggagttttataaagctgaatggaaaatttatgcatccaagataagcgggatgtttgagggaggaataggatgatggacagggcgcagtttatgcaggagctggagaagctgcttgctgatatttccgagacagagaggcaggatgcccttgatttttataatagttatttcgatgatgcaggagctgagaatgaagcttcggtgctcagggaacttggaagtccagagaaggttgcagcgatcatcaaggcggatctgaaaggttcggcaggaggctatgagtatggagaatatacggagcatggctatgaggatgcccggactaaagagagaggccagatgcctgagagatatgaagaagagtcgggaacagggaagcgttttttcagaaaggggaatcaggcggtgctgatccttgcggtgatcctgctggtttttatttctccttttgttaagggggctgttggtgggattctgacatttgcagttggaattttactgcttccgttctggctgatcgttggattgggcataggtgctatggctttactggttggcggaattgcagctgttgtggctggagcagggcttttggctgtaatgaccggaaccgggatcctgacgataggaattggatgtctgatgattgctctggcaatccttatgatattaggactgatcagcatcgcagtacacattgtgccgaaatggtttcggaagattaccgatttttttaacaggttgctttacagaaagagaaaggaggaggttaaatgaagaagtttacaaaaggaatgttgatcgcagcggggatttttggtgctgtgggaatcgggctgacagctgccggtggtgttatgggagccagtatgtcggaactgacaggggtgaaaagtctgaaaagggtgcttctggtggcagatggggattatgattatgatgacgatgatgattatgacgacagtggtgattatgatgacagcgatgactatgacagcgatgattatgacgacagcgacgactgtgacgacagtgaggattatgcccgcgctgttgatgagaatgaggaagatggcactgtatatcagttgaagtatcagcccacaaagctggatatagagctgaagtacgatgagctgattctggaagagggcgacagtttctgcgtcagagtttatgatgacagtgggaagaatgtgacagtgaaggagagttcagatactcttaaggtcagaagcacgaaaaagctgtctaaaaccagaaaggtgcatatttcctatccggaagatgttaagcttcaggagctggagattgagatgggtgcaggtactgtttatctgaacagagatattgagacagagaagctgagtgtagagatgggagccggggaatttgaaagtaagaatccggtgactgcaagggaggcagatctggaaatcggaaccggaagtatgacatttgcagatctgagcgccaggaagacagatggagaatgtggtctgggtgaactggatctgacactgaccggtacgcaggaggattataattatgatctggaatgtggagtgggaaatctggatgtaggttctgattcctacagtggacttggacgggagaaaaccatttccaataaaggcgcagacaggaaactggatctggagtgcggtatgggaaatatatcagtagatttctccgggaaagagcacagagatttgcagatatcctgaagagcagatactctgacgtgcagaaataaaagtggtatttaaccgaatcaggaagttattcggtgtagagtaagtagcgaagtggatgattttatctgcttgactaatctgggtttaaggaggaaatggaacatgggtgacaaacgtttatacaaatcatcagaaaacagtatgctttgcggtgtatgtggaggaatcgcagaatattttgatattgaccctacgttggtgcgtctggcatgggtgatccttacctgctttggcggtgcgggaatctgggcatatatcattgcggcaattattattcccaaaagataacagaatccaatctgcaatagacagaagtttaaccgaatcaggcaggcagcgaagcggattgcgaatatccgtttgaatgaaatacagtataaaaattaagaaaacagcccatactccaaagaaaaggagtgtgggctgttttggataaagagaaggaaataaaagcttatcttgatggagaattattgccggaggtcagaatgaagtatgaaattgcagaggaaatgggactgctggacagagtattgagtgatggatggaaaagtctgtctgcaaaagagaccggaaggatcggaggattgatgacgaaacgaaaaaaagagaaactgaaaaaataaatgaatgatatgggataaacatataacggaataaacttgttctccgggcgatgatgctgtaaaattagagcaagtagcgaagtggataattttatctgctataaatatgggaggacaataaaatgaagttaggtattctgggagcaggaggcattgcttctactatggcgaaaacagtggcaggaatgaaagatgtggaggcgtatgcggttgctgcccgtgatctggaacgtgcccgggtatttgcacagaaatatgaagtaaaaaaagcatatggatcctatgaggaaatgctggcagatgatgaggttggactggtttatatcgcaactcctcattcacaccattatctgcatgcgaaaatgtgtctggaagcgggaaagcatgtgctttgtgaaaaggcatttactgtaaatgcagagcaggcacaaaaattatttgaccttgcaaaagagaaaaagcttctgatcacagaagcaatctggacaagatatatgccgtccagaaagatgatcaacgatattattgaaagtggtgtgatcggagaagttacggcagttaccgcgaatctcagctatacagtaagtcatgtggaacgtatccgtaaaccggagcttgcaggaggtgctcttctggatgtaggcgtatatccgatcaattttgcctccatggtgcttggcgataaggtaaaggatgtaaaggctactgcaatctttcagaatggagtggatattctggacagcattgccatggtgtttgagggagaccgcatggcaacccttcagtgtggagcaagagaaatctcagacagaatgggaagtattttcggaaccagaggatatatgcaggtgcagaatatcaataatccggaaaagattacagtgtttgataccgaacataaagaagtggcttcttatgttgtgccggaacagatctcaggatatgaatatgaggtagaatcctgcatgaaagcaattcatgagggaaaaacggagtgtccggaaatgcctcatgcggaaacaataaggatcatgaaaatcatggacgacatccgtaaatcctggaattatgagattccctgtatcgaataaaaagtgtggaataatcttataaaaaagaccagtaatgtttttgacatatacccgaaacattactggcttttctgatattcatgaccattatacaacatgtcattccgtaattacagaaacattcccgtccagtggtatattaatattaattaggtaaattgatacttttatattttattatctggaggagaagaatgaaaagtaattacaaaatttttacagcagtttttttatcggcaattatgacagcagcagctccgttaacagtatgcggggcggaagttttttcggcgggagaatctttcagtgatggaacagggagtattcctgccatattgacagatatggttctgccgggtggagagattggaacagaatatcaggtacagcttgaagctgatacagatgtgagctggagtctggaggagggaagcgagcttccggcgggacttacgttgtcttccgggggagtgatcagcggaacaccgcagaaggaagggagtttcagctttactgtacaggcggacaatggtattggagtttcttcacaggaactgagcctttatgttgcacagcgtgagcaggaacctgttataaagcagtatgagctgacatcaggtactgctttgatcaatctgggaattcatgcagagggagaacagtcacgtaagcggttatttctttataatgcaggaacagattcgcttcatctctctgattttccgcagagcagatattttgatttttcctacgcaccgattttcgatacaaatacggatgaagaaatgcagcccggaagttgtgcggctgtggacattgatgataagaagaatctgcctgccggaaattatgaagagacagtgacatttgagacaaaagagggtgcttcctgtaaggttactctgaaagtaattgtgggagcttcctctgaaaaagattatgagctgagtatagaaacaggtacagaagaagaatttacagaaagcgatttctatgacccggaatttcgtgtggagaagtatgtagtggtcagaaattcaggaaaaaaggaaaccagaatacggatagatacttctggtcttaagaattttgaagtggatgaccagatggcaaagtggacagaagattatgaggaacaggattccaaaaagctgctgaaaccgggagaaacgctttatttttatatattgccgaagcaggaatacggaatttatgatgaaacgtttgcatttctcgcagatgacggaagcagatatcctcttcatgttacaatgaacagagagaagaatccgacagaaaagaagcagctggaaattactgaaaagtctgccgggggttttccgacaatgcagtggggctataagacacttccggaagcaaagacatatattctgaaaaatgttactgatacagatatgaagctgtcttttaaccgtagtaaagaatgtagtgtgttattatctggaaatgcttatctggcacctggggagagcacagaactgagactctggcccaaactggggctttcggtgggaaaatatagttttcaggtgactgtgactgcgaaaacagtggcaggagaacacctgacaacgcagaatctgtataattcttttattgtaggagaccggacttatcagggactggcagatgctgttgcgcctgtgaccggaattaccaatggtgcagaaaaaactgctgatgctttgcatctgccgaagtcgctggaagtctatggcgccgaggtgaatggagagaaaacaacattttctgcgtctgtgaagtgggatgtggagaattgtgcttatgatccgaaaagcaaggcagctcaaagttttctggtcaacggatctctggaactgaatgaggatgaaaataatgaagggctggacactgccgtacagataatggtacaggtggatgcttatcagacattaaacagaccagttattgatacgcggtggaccagagtgatcacaaattatgcaatgctttatctgagagatctttccaatgaagcggacggctatcagtttgtgacagcgaaatctcagaaggatctgaaaaaggggaattatactgcgcagacaaaaattacaaattctgaactgaatcaatatcctgagctgaagtatattccggagggaacacatagtctttattgcagggcatacaaagagaacagcagccatgttatggaatatggggaatggtcagacggggttccggttacggtaaaggcaaagactccggacgcacctgtggttcagaaggtgcaggtgaagaaaaatgatgtcagaatagtacttaacagcaagggtgaggaaccggacggttacgatgttgttgctgccagaagtaagaacggaaaagaaccatcggattatataaaggtaaagagtgggtattccggaagcagtaaagagcttatcttacggggcgtaccggcaggaacgtggtatattggcgtacatgcttataaatatctgaatgggagcaataccaaagtgctcagtaaatgggcagaggtcaggaaggtaactgtaaaaacaagccttgtaacaggaaaacctgctgttaaatcagctaaggtttccagacagggaacaaaaagaaacgtggcggtgacgtttactgttccaaagtcctgtgatggaacagactgggtactggcaaagaaagtttccaaatctgataatggcagctatactggtgtaagcagttatgcttacacaaagaaaaatcagacaaaaaccacggtggtctttaaaaatgtgaagcccggagtctactaccttgcaggacgtgcctatgtaaaaggttatgcaaaaagttatacgaaatggtcgaaaataaagaaaatagttgtgaaataagtactgctgccatttgtttcacagagatttcacttttaagaaaaaagatattccccttttaccaagcgtttataaggcaaaattatggggtaaagattttggaaaaaaatggggcacatttcatgacagataagggacatatgaggcatcgaagcctgtgaagtatgtcataatgaacaggaaaagcacattatgataaaggcatcgacatttttaacaaatgtagaaaggataacaaaatgaagcagaaaaagattgcaattattatggcagggattttagcagcagcggctgctatgactggctgtgcggaacagaataaaacagagacacaggttgattatacgcagaactcacaggagaaatccgaacagacaaaacaaaaaacagcagaaaaatctcagccggataaaaaacaggtaaataaaagtacatccattggaaaagaagattcaaatcagactgcggataagaagacgaaaatatctgcttcatccaataatgcaggcgacgtacagaattcagagaatggaacagacagtactgcgggaactgatacagacgattcccagaccacaggggtggacacttctgcatctgaagataatggttcaacaggtaatggtggtactcaatctgatcagagggcagatcaggcaatgatatatgacagtgagggaaatggaaggctgatttctgaagctgatgatggaaactggtatgacagtgacggaaattactatggaagctgggaagatattgaagatgctatggtaaatgaaaatggtgtcacagatcaggatggcaataaatattactggacagcacctcacgatgcatcagaagaggtcacagatccgtatgacctgtattcctgggatccgggaaccaattcctatataccgtttcaggctgcggaatctgactgtagtcctgtaggcagaggaaacggctggtattattatgatgaagacagcggcgaatatgttccgtggtagaatataaaaatgcgaaaagaagcagttttgagaccattttaatgggtttcaaaattgcttctttttgttatatacatgaatagtgaaggggtatatccgacagaatcaggggacagaattctgccggatgtttatctggtaaagatcagctgatcagtttcaggaaagtatttctgtcacaggttccggaaactgttaagccctgtgccttctggaatgcctttacagcagagagaagtcctgagccaaaggtaccgggaatctctacaccgtttggatcataagcacgtaaaagaaggagaatctcagcggcagttaccatatactgtgtttcaccattttttacataatgctgtccaagagcattgtctgtgtttgttccccagataccgtctacatccagaccggcaccataatccctgttcagagctgtctgaagaactttaacgcctgcttttttggtagcagcgtctctttttccggtaatagagattcctgcattggcgaatttattggcataaccctgacctttgcggatttttgcatttcctgcagttggctgaggttcaggatcaggatcagtagttgaagaatcttcagtataacggagaacgcaatcccaggggaaattgtaataactctgaagtttgatctcttttccgctctgatctccgggtttaccaccatgatatccattattttcatttttgctggcagataccacctgaccattaccaatgtgcattactgtatgacttgcgatgtttaataatacatcgccacgtttcatgccacttcctgtgctgagattaactttggaagttacatccttaaagccgcaggacagaaaaacggatttcatatttcctgtataagtggctccttttgtttttacaggaacaccagcctgctgccatgcggagattaccagtgaagaacaatcgtagtccggtccccatctgttatcctgatcatatccgtgtgccggatcgtttgcgattctaattgcccatgttactgctttttctgtttttgtcattttttcatcctcctgaaatttgattatttatttgctcaccggtgatacatcttataaagagtgagaaaagggaaaaatgtaaacatgaaacagaaaaaaataaaaagcatttcctgattgttgcttcgaggtcagaaaaatgcttttcgaggacaaaaacacgaaaattgtcgaattgtaattatatttaatcctgatgagaggcctgatatattttcagtatttttacaatgtattcagtctggcgttcacccatttgattcatgattgaaatcgcatcctgaatagccgggctttgaatatctttattatgaggaagcagatcataaagaaaatagtcaagtcccacatcaagaatttcagaaagcttaaggagattttcgatagtaggcatatacttacctgtttcaatccggctgatcgtacttacagataaaccacttaattcttccaggtgttcctgggtaatattcctgttgatccgagcttctgcaattctttttccgatagtattgtttttcataaataaaaatcctttcctttgataaagtttaacagacggaattaaatatgtataaggatataaatgacaagtgactaatcaaatttgatatgttttatgacaggaggaatataggaatatggacgaatatacaaaggatttgtataccatgatgttttctttgcagactttgcaaaatcagggaattacaatcagagaaactgtatataaaagtctggacaaattactgttatggaataaagaatctgaaaacagtaaatatctcgaattagcgttgcttcatatgcaggcttatgctaatatgggatttgctttagatgaagaaaataagacgatatgtgagatattgaaaaagacaggaaagaccagagaagactttttcccgaaaggatatcttcttggaaagagaattaaactgaccagatcacaggttcgtggtatgattggaagatggagaccttccagagacagtccgatgacaatcggagaattggtggatgatatcatcagaaaggtaaaaaatcatgaggaaggcagatacatttatcagtatcacagaactgatgtgacaaccaaagaggatatcgaggtttatgagctggtcatcaataaggatgaaagttatttttatgatgtgaagaaattcagattttatacattcatggaggaataattgctatgataagaataatgattctggatgatgacgaaatgtatctgaaaaaagaaaaggagattacagaacactattttgcagagaaaaatatagattgtacggtaacgacataccagaatgtggaatggtttctgctgggattgaaggaagaaaaattcgatatgtatcttctggatatccggatgccgggagaaaacggaatagaggcagcaagagagatacgcagactttatccggatccggttattatatttattacaaattttgtggattatgcaatagaagcatatgaggtaaacacctatcgttatatccccaaagagtgtctgaaggaaaaactttcgcaggcttatgatgcgcttcttcctgtaattatggagaaagaagagcggtactatatcataaataaaagaaacgaagttgaaaaactggcatattctgatattttctatatgaaaaaagaaggaaaatatgtgatttttgtgcacaggcgtggggaagtaaagatcagagcaagtctgtcaacaatagaaaaagaactgaattcaaaagaatttattatatctgacagaggatatcttgcaaacatccaacatgtgatgaagatgaaaggaagggatctttatatgcgggacggtaatattattacagttggcagagaaagattcaaaggtgtcagagaagcaattctgaattactggggggtatgaagaatgctgaaagttttattgtatggactggcaacgtttatggagactgggataggtgtctggatatttgggcagatgtttccgaagcggaaggtactgaagagaaagcaatatttttcgatgtggttaatgtatttatggataatgataggggcatatacatatcctaagctttttttgcatgtaaatagaattcatggatatttaggatgcataatcgcattctatttatctggtatattaggaatgactatatttattgtaagatgtaaagagtgggatttaataaaagtaataggatttatattgatgcttgctcaacttgaatgtcaatattggaattcttatcaatcaataattatgatattgttgggaaacatagttcctgttttatatttgtatatattttatcaatgcagtttgtgggatgcttatttgtgggaaataatctatttagcgaatatagcattgctaaaagaaccatatgtagcctatgtaggaacttttaagaatagaagttttattgacttttttttatggccacgtgaacatttatatagcgaaattctttatgtgattattatatacagtatgattctgctcatgaataagtacatttgtatatcaagatggataaatccgttgttgaaggaacataaaaagtatttatttattatgacatgtgctgaggtatatgttctaagtattttaatgcattttggtgaaggaaaaataacagaaaacaatctgacaattacattaattgtcttgatgatattggttttaggtttgttgtttgtatatttaaaaatgcaggaaagactaatcaaatcagaaaaaaatattctaaatatgcgatttgaaacaatgacagaacaatataaagaattaaaaaaatcatatgacaaatatcgatgtctattgcatgatgaaaaacatatgattttatatttaaatgaatgtttagataatagggatataaaagaagctaaaaaaattctacgaggttataaagaactaacatttacaaaagataaggcaatatggactggaatatctacattggattttatgttgaatataaaaattgagaaaatgagagaacaggaaattgaatttaaaataaattctcaggttgcaaagattccgatggaagaattagattttattatgatgatgggaaatcttttagataatgcaattgaatctgctgtcaaatgtagaaaaggtgaaaggtatattgtatttaaaatatataatataaatgatatatttgggattaaaattaaaaattcaagtatatcgaaaccaacgatggttggagatgactttttgacggagaaaaaggaaaaagatattcatggctggggaataaaaagcgtaaaaaagatattagaaaaatataatggagaattaaattttaagtatgataattcattttttgaaactcatgtaatcattgaagatgatataagtataatggagaatatttatgaaaaataatgaaaagaactttataggagatataaataaagaattagaagaaattgaaaaactggacattttagaagaaatcgaggagagtctgttgacaatgcttggatcagttaattcactattttgctgtcattagtaaaaaacagtaactaacagtaggaagtatattaaattgataaacattattcaacgaatagtaatatttgatatatatcgaaaaaaaaccaaccatgatcttcggggtaataacgtaaaagaacaatatgattattatgaaaaaaaatatcttaacaatgcaacatatgtaaaatctttactgcaggaatatcccgagttaaaacgtctgcttgaattgaaaaataactctatccagagagcagaatgtgaaatcaggaaatctctttatgcagaaaaagaacagatacaaaaaatattctgtgatggaagaaagttttccgggactgtgggaatttacatgtcgaaaggcgatacacacagaggaggacgaagtgtggcgaaggtagaattggataatggaacaatcctgtactataagccacatagtcttgataaaaatataaaatatcaggaactttataactatttatgcagaaaaacaggaatttcctgcaggacggtacaatatttatctcatgattcctatggatgggaagaaaaaattgagaatattccctgtaaaaacgaaagtgaggtggagcattattatttcagaatgggcatacatctgtttttgggatatgcccttggagcaacagatcttcatggtgaaaatattatcgcacatggagaatatcctgtgattatcgatatggaaacgtatccgggatatttaaaacaacaatcagaaaaagacggaagtagtgtagaagaaaaaataaacaaaagtacagaaataaaattggcaaattcggttatacatacaggaatgctccctgttctcacatggggcagaggaaacagcagagttcttataagtgcaatgggaacagaggaaaagataaaaacgccgtttaaacttcctgtggtaaaggatgataaaacatctgatattcacatagaatatgaacctgtggaaatgcagataaaggaatgcattgtaagactaaatgatcaggttatcaatgcggcagattatacggaatgcattatcagaggattttgcagagcgtacatggtgacaatggcagataagaaagtggaggtgatgttgtccggcttttttgacggacgttccagagttgtactgcggcatacccaacagtatgcaatgtatcttatggcttcgtttcatccggattatatgaagtcaagagaatgcaggaaagctcttttgaatgtgattcacaaagagggggaatcttcttttatgaaagagattcatgattatgaaattgacagccttctggaaatggatataccctgctttgagattgatgcgaacagcagatctgtttatgatggaaatggcggagaacataaagagtatctgccatgtactccttatgagtcatggcgaatgcatatgaagcagatgagttactctgatatggaatgtcagtgtgattatatcaggctgtctatggaaatgctgaaggcatctgatggaaagaaaaagatgtttccgaccaggataaagggatataacacagataaagagcgcaaaatatacagtcagatcagaaagatagttcatcgaatctgcagcagagcaattatccgggaacagagtgttggatggacaggactgcagttctgggataatggtcactggaacctcagatcaggtggaatctatttatatgatggaatatcggggacagtcttgtttcttgcaaaatatcttcatgattttgaagaaaagaatgcaagtgcagaagaaatttatcatcttgctgttttgagattgaaagcttatacagatgaaatacacaaaaaacagatttatgataaaaattttctgacaggtattgtaaatggagaaagctcggtggtatatacctatctttatctatttaaacttacaggaaaaagagtgtggatgatttatgcggaaaagcatttcagcattattgagagggtatggaaagaagattcacaactggattatctgagcggaaatgccggagctattgtagtggcagtgatgttatataaagaaaccggaaatctgaaatattatgaaatagcggcagatatggaaaaagatttgtggaagaaaggacaggaaaccggaaatggatacggatggagattaaaaggaacagacggaccgctggctggaatgtctcatggcaacagtggatttctgatggcttatgcagcgttgtatgaatgtaatcataaagcggaatatgctgataaaatacagcttttgctgagatatgaggattctctgtactcagagaaagccggaaactggaaggatttacgagagagttcaggggaaagcttcatgaatgcatggtgccatggggcgccgggaatcctgctttcacgaatgaaactggaagagctgtttcctgaggatatgcagattaaaaaagacaggttaaatgctgcagactctttgttttatggagaacaggatgaaaaaatttgtctgtgtcatgggatgtccgggaatttacttattatgaagaagtaccttcgaaaatatggtaataaaaaaatgaaggagcaatatgaggcgttatgtgactgccttttatttcaactggatcacccggcaaaaatatctgggacagaatatctgaatctggcttttatgaatggcatttccggtacgggaatggcattaatggaaattttatgaaaactaagggaacacctgcagactgcaaatttatggtcagcaggtgtttcttttatttgttttcggaaatatatttgagaattagtttcttcttcatccgattgacgtactggcgggacagcttcagtttccgggcaatctgggcatcgcttttatcctgataaaagtacatggacagaatttttctctggacactgtccgaagggtaagagttgatatatgcggttacatcataataggtgtcatcaaaactgtcgggagcctgtaatgaaacagaacaagaatcaaaatcatctttttcaggttcggaaagacaactgcggcaaagggaacgatatctgttttcgacagaggtctgcatgtatctgatacattcaccttctgaggatgaagaacttaaatatggcaatgtctttaacagagtaagatacaattcctgtatggaatcttcgcgttccatgcagtgaatccgggatgcatatcctttcacaagcggttccatacgtttgagaatttcactgtctgaatctgggataccattttgataattttggataagttctgtcagtgttttcataggtatctacctcctttttaggggaagtagtaagaaaactgctgatcagaaactaaaaaagaaaaaaatttgtgagtttacaaatggaagagaaaaaactctttattaagtgaggttgcaaatttagatcagcgataggagaagaaatacatggtaaaaagagatttgcaaaataattgtagagaatagaaatatgctttaaattaaaacggtaataataagattagaaaagacttttagtagacaaaacatagaaaaagtttgcataataaaagaagattaaggaaggaggcagaaaccatggaaacaacggttatgaatgtggcagtttcacagggaatctgggctgtgcttgcggtttttcttctgatttacattgtgaaatcaaatgaacagagggatacaaagcaggaagaacgagagaaaaattaccagacggtgattgagagtttaactgagaaatttcagattctgaatcaggttcaaagcgatctgaaagagattaaggataatctttttaacaaaaattaaatagggaaaagaaaaaagccttttctgcaggatatatttttccagcggagagggcttctgtcattttaggtaagaaaataggttaatttgagaaaaatatgtttactaaaatggtagatgaatataagcataacattcgtgtccattagaatacttttaatcccagatttacagatgttcgtatagtaaatggtatattatgataataaaacctgacttttgggtagtgtaaaatagattaaaaaaaatggccgcaatccaagtgtttatgcgagggtgtaaaaattcttgtgtctatggaaagtaaatctttctgataagaaatagatatgtaaaattttgctgtcgaattaatgattatgcggctgtcgaatatatctttgtacttacagtattgccatgtaggaaaattatatacatcattttcgatttttttgcatgacaagtaaggcatcatgattaccttaacttccaaaaatgagtagccctaacgaaaataaaattttaaaaaagcccgtatttctgcggaaattattgcaaaaatacgggttgtgctgtacaataaatttagggctatataaacctgaataaaggaggcaaatatgtacctgaaatcaagagttaagctaccggatgtgcatggaaaattgacccgattaagacgcggggatatcacatatattaagtatgagtatgatcgctattatgatccggagaaaaaatatacctatccacagagagcgactataggcaaggtatgtccagatgatgacactatgatgattcctaacgaagcctttctgaaatactttccagatgcagtcttatcagggatggaagaccggacagaacgtagcagctgtctgcgggttggtacatatgctgtaatgcataaaatagtattggattattcgttagacaagctgctcggacagttcttctctgagcgggatatggcattattgcttgaccttgcctcttactctattgtagaagaaagcaatgtggcacagcattatccggattacgcatacaatcatccactgtatagttctggtatgaagatctatagtgatgcgtcggtaagtgatttctttaagagcatcaccaaggataagagtacaggctttctgaatgaatggaatgcaaagagaaatcgaagggagcgtatttatatttcctatgattctacgaataagaactgtcaggccggagagattgaactggctgaattcggtcatgccaagacagatatcggttcagctatcatcaactattcggttggatatgatcttaagaataaagaaccactcttttatgaagcctatcctggaagtattaacgacgtatcacagcttaggaccatgcttggtaaaatcactgggtatggctataaaaaaatcggtttcattttggacaggggatatttcagccgtggaaatatacgctatttagacgaatgtggttatagttttgtgatcatggctaaaggcatgtcttctttcataagtgatttgatcttagagaacaaaggaacgttcgaaaataagcgctcttgtgacatgaatgcctatggtgtgtatggaaaaacagtacaaaggactttatttgaaggcgatgaaaaaaagagatacattcatatttatcatagtatttcaaaagatgctgatgaacgggagcattttgaaaacgcactgagagagcggacagctttgctgatgtcacatcagaatgaaacagtagagttcggttcagcttacgaaaaatacttttatcttcactacgataaagatggcgtgtttttatatccggaagaaaaaacaactgtgacagaacgggaaatatcattatgcggatactttgttattattacatccgaaaggatgaccgcaaaggaagcactgcatctttataagagccgtgatgtatctgagaaactttttgcctctgataaatcattccttggaaacaagagcatgcgttcacatacaaacgaaggagttgagggaaggatttttacacaattcatcgcactgataatccgaaacaaaatttatactgcattacaggaagagaacgaaaaacttgagaagaaacagaattatatgacagttccggcagcaatcagggaacttgagaagattgaaatgacacgccagacggataatgtataccggctggaccatgctgtaacagcaaagcagaaaaaaatcttagaggcttttgggatgaatgaaggaaacattacttatcgagccggagagatcagtaatacacttaagaaatcaaacattcagaaagaaaggcggtaaatatggcacgtgaaataaacgcagaactactggacactaaaattgaaaaagcacagaagaatctggtgaaagcaaagcatcggtatgatgctgcggcagcaacattaaaagatttattggataagagggatgcacttcgccagaaaaagttattggatgctatagcacagagtggacggagctatgaagaaatcatgcagtacctgcacagtaaatctgaagaggcgtgatcaaatgttaacggaatactattttgcagtcaggtatggagatatcattattcttctctatcatgaagatatgatgtctgtatgggaattattatttaagaacagccagaaggaaaaggcattgaaaagatttttagaatactgctacatgatagatgtaaaagtagcattcgaaggtttgaaaggagaaaaaaccaaagggttaaaggcaactcttaaatttgcgaaagaacatgatatgtgtatgactgaagcacagattcaaggtgccaataacatgtaaatttccagcccgagatgcttttagggctattccaggctggaaattaaggcagctgctaaacaaaaggctttcagactacaggcgaacatatgttgctgcaaaactgtggagattaatttaaatttgcattttggttcggggtcattagaatacttttaataccagaaatacaggatcttttatagttagtgatatattatgataatagatgaatattattgattggaggagattctatgaagtcaaagaaagtaaagaaaatattgttgattgctttaacgtgtgtagcaatttctgcatctgtctcagcagaagctgctatgaaatcacagataaccattgaaagtaaaaataagtatgaacagttgaaaatttcagagagccgtgtgtatggagaatacccaactggagattataagaagataatgcttcttccttcggtttctaaagtagaaaaattttgttttgaagataatttgaacatagaagaagtagagtggatggcttcagtagatactgttccagtttttgcctttagcacatgtccaaagcttaaaagggtaatactttctgataatgtgaaaaaaattggacaaagtgcatttatatactgcggtgaactgacgagtgttaaacttccccaaaatcttcaaagtatagatttttttgcatttgctgactgtcgaaaactgaaaacgttatatatacctgaaacagttactgagataggtgctgaggcgttcataaattgtgattctctaacagttcatggaaagaaaaattcatatgcatactattactgtaagatgaatggtattccttttgtaagtgagggaactgcttcaaaaccagaaacaaatcgtccgtatataaaatctgttgattcagatatagtaaacaaacaaatctatgttacaattgatttgagcggaaaagtaaagaatgcagatggatatcaatatcaaatatatgatggtactaaggtattagctaataaaaattctgcaaacacaacctgtatattaaaaaaagtgccgactatgggatttgccagagtccgttcttatactgttcaaaatggtaaaaaaagttatagcaggtggtctaatgaaatgcgtatgcctcctgttaaactaaataaagataatataaaattaataaaaattaccgggaaaaagaaaacagtaaccgcacagtttggaaatttaaaatacagtgatgggtttgattgcgtacttaagaatgcagattcaggagaaaatattgtattaaaaaatcaaaagaaaaatacagttacttttaaaaatataaaaccgggagtttactatttgaaagcgcatgcatatacgttgttgaatggtattaaacagtttggcgtatggtcagataataaaaaagttgttgttaaatagaaaattggaattataaaaagcaggcgaaaaactgcctgctttttataatggaaatttatgctgttattgatgtagcgaaatcaagctgtaataaattcaagcgtattatactgaaagaagccgtcagtggatgctaaaccactggtgtgggtagcatctttgacattgacattgcacacagcgattaatttattattttgatccagagccactgattccagttcaaaactgttatatgtgcggccctgagcatctttagcaggaatatctgtaacaaatccgaaatccggatataaaagtttgctatcatcaagttttttcagattataatgaagcaaggtgttttttgttgtgattttagtcgttactccacttacagtatgtggattactggttccgacaaaaagccctaatttattgtgatagaaaatatcctgggatgtaggctgaccggcgtttaccagtgtacaaagataagtggcttttacatttttttcattttcaaatgtacatttatagagctttaatgttccgtcaacaacggacaataataaagctgtatttgcctcataaaaataattaattgctttaagagcaaatgatttatcgttatcgttgggagttactgtatatgttatttcctcatcctctttgttactgctgatagcaaccactttgttatttcctgcgacaacaaagaattttccgttaaaacagctcataccgttggcatgacctaataaaccgtcagtgaatgttttaaagtgagatacacctgcgcttgtattcatataatttttacagtagccaagaacagcgactttatcttgactttgttttataaaatatggagtattgtttccgttaaaggatacacatcccagattagttgtttcatagttgggatctactttggtaggtacacgggctcctgctttaaaaccgcatgcaaaagtataggttttaccggagtaggtaatgccttccagcacagagaatttatcttctgcggttccatcagatgttataacattggatgcaagcacaaggtgattggctttcatacagattgattcaaggttgtactgcttatattcacctgttttatttacattgatgaccgaacatggagtgtattttttacctttatcatcagtaagatgataatcaactaccagaatacggttctgaagtgttgaaaaagtgttatttgtcaggataaataatccaaatgaagtgtgatagtaaatatcctgaagccgtgtggtataaccaaaacctgagttagtaactgtgaatgtacttgctgcttcagcagccttccagtctacaacactgaaagctaatgtcccagcattgctcttgtcagcgtaatgcataatgataaatttctcgttagttccgtcagcagcagtgatacctaatgcgccttttggacaaatttcattgatactgtacgtaccgagctgattgcctttggtatccagttttacgatggttgtagaaccgccgtaacctttatggtcttctgcaagcatatacagataatttccaattttggtaagtcccagagcgaaccagttcagatctttttttacggcagttgcttttgttgccatgtagtcagtcgttttgagtaatgtagttttaagaccggttgtctttacgcaatacatatctgaccccacaatggcaattcccgctacatttgttgcacttttatcgggaatcagtgcaccgtctacgggggtagctgaaatagttaaagttgttccgttaaatgttcctggcataatttttgcctcctttaaattttttgaatttgcaaattcactatataaagatgctgctttttgtgatttgtaaaccataagtgtgtatatgagcatgatttttttctttcatgcggaaatcaggtaagaataaaaataaagattcgaggtcagatgatgtatgtttagtcccacttttatattttcgtcatcagcttaatgtaaaataataacgggtaaagaagatataagatgttctggtacacgaaataagaagaaaggagatatgccacatggttaaaatgatgaaccgcctgagatgatcaggcggttttgaagtatctggattttttatgaatattttatttttaattacaggtataatgtgttacaataaatataaccattaagactaccaggcaggtcagaatttgacctgcctgtaaatgcatacggaaataaatcggggtcaaaagaatcgttaataattgtaacaaaataaaattaccggtgtagcaaaaataaaattacaggggaaatgcggatgaatgagatgacagatgcatatgtaaaactggataaggtttccaagatatatggaacaaaggaagtaaaaatcgttgcagtagatgagatcagctttgagattgccaagggagagtttgtagtgatcgttggtcccagcggtgcgggcaagacaacagtgctgaacattcttgggggtatggatcaggctaccagcggagaagttctggtggatggaaggaatattgccagatataacagcaggcagcttaccggttatcggagaaatgatattggatttgtattccagttctataatctggtgcctaatcttacagcactggagaacgtagaactggcattgcagatctgtaaaaatccgctggatgccaaggaggttctggaggaagtgggactgaaggacagactgaccaatttcccggcacagctttccggtggtgagcagcagagagtttccattgccagggcactggcgaagaatcccaagctcttactgtgtgatgagcccacaggtgcactggactaccagactggtaaggcaatcctgaagctgttgcaggatatgtgcagggagcgtggaatgacagtgatcgtcattacccataactcggcgctgacacctatggcagaccgtgtgatcaagatcaagaacggcaaggtttccaggatgacaatgaatgaccatcctacacccatagaggagatagaatggtaggtgatgaatatgaaagcaatgcataaagatttctggatggagatacgcaagagcaaagccagatttatttccatatttatgatcgttgctctgggagttgcgtttttctccgggatacaggcctcgtcaccggatatgcgcttctcaggtgatgcctattatgatgaaaccaatcttatggatatcaaagtaatgggaactctgggactgacggaggatgatgtagctgccattaagcaggtggacggagtagagaatgcagagggcgcctatggtacagatgtaatgtgtggagaaggcgagaagcagaaggtacttcatgtggaagctgtggatcaaaccatgaatcggatctcagtgacagagggaaaagctccggaaaaaagcggagagattttccttgactgtatttttgctgagagcaatggatataaggtgggtgatcagattaccctgaaagagggcggagacagcgaactgttgaaaaagacagattatacagttgtgggtttaggagagagtcctctctacatatcctataatcgcggaaattccactttgggttccggtgaggttaatggatttgcctatgtgctccctgaggattttgaccaggaagtgtatacgcagatttatgtgcaggctcatggggcacaggatctgatcagctatacagatgcttatgattccctgatagagagagtgcaggagcaagtggaggggattgaggcagaacggtgtcaggtcagatatgatgagattgtagaggaagctaatgacaagcttgcagatgccagacaggaacttgaagacggaaagaaggaagctaatgagaagcttgcggatgccagacaggaactggaggacggcaaaaagaagttaaaagacggcaagaaggaatataaggatggcaagaaaaagcttgcagacgcaaaaaaggaactggaggatggaaaagcccggcttgcagatgcaaagaaggaattagaggatggcagatcccagcttgccagtgcgaaagagcagcttgccagtggcagagcacagatcgcatctgcaaaggaacagctgaatgcaggatgggcggaggtttcagagaaccaggcaaagcttgatgatggaaaagcacagcttgaggatggcaagaatcagttaagcgccggtgagaagcagattgcggatgcaaagacgcagcttacccagagccagcaggaacttgacaatggaaaggcgcagattcagtcaggcagagagcagattgcagcaaccagacaggacttaaatgccaaaaaggaaagctgcaatcagggacttgcgcagattgagcagcaggaggccggacttgcagaaggagaggctcagcttgagggtgccagaagtcagcttgcagcattgcaggcacagtatgagcaggcacaagcttcaggcacatattccgaggaagacctggcggctctggcagcacaggtttccgcttatcaggagcaggtggacagtcaggcagcccagctggaagcatccagaaaccagatcgcagcagcaagaagtgaactggagagtggtttaagccaggtggagagcggactgtcccagcttgatgcaaaggaagcagaactgaaccagcaggaggccgtatttcccgatgcccaggcaaagattgatgcaggatggaaagaggtgaaggctcaggagaagaagctggaaccagccagaaaagagattcaggaaaaagaagcccagcttgagtcagcacaggaacagatcgatgctgcaaaagcaaaactaaattccagccaggcgcagttagaggagaaggaggcagaacttgcttcgggagaagcacagatccgggagaatgaagggaagcttgcttccggcgagaaagagattgccgacaatgaacagaagctgagggatggagagaaggaaatctcagagaacgaacagaagctgaaggattccagaaaggacatcaaaaaagctgagaaggatctggaagaaggtaaaaaagaatacgaagacggcaagagggatgcagagaaagaaattgcagacggtgagaagaagattcaggatgcccaggatgagatcgatgatatcagtatgccggaatggatggtaacggaccgcaatgatctgccggaatattcagattatggggataatgcagacagaataagaagtatcggacaggttttccctgttatctttttcctggtggctgcactggtaagtctgactaccatgacacgaatggtggaggaacagagaacccagatcggtacaatgaaggctctgggatacggcaagtatgcaattgcatccaaatatctgctgtatgcctttcttgccacagtgggaggcagtatcctgggaattctgatcggagagaaaatcctgccctgggttattattaacgggtatggcattatgtataagggtatgatgaacaatatccagatccgttatgaattaaaatttgcaatgatagcagcaggtgcagcaactgtgtgtactgtcggagccaccattttctcctgttacagggcactggcggaaactccggcatcactgatgcgtcctcctgctcccaaagagggtaagagaatcctgctggaacggatcccgcttttctggaagcacttgaattttacatggaaatctactctgagaaaccttttccgatataaaaaacgtttctttatgacgattttcggtatttcgggaagtatggcgctaatgctggtaggttttggactcagggattccattatggatattgccagacggcagtatcaggagcttcagcattatacaggaacgatcattgatgatgaggaggcaacggataaggagagacaggagctggatgaatttttgaagaatgacagccagatcgagagatatacccatgtgcagtttaccaagatgagtgttcccagaaataaatccaatatcagcgtatatgtgtatgtgcctgagaatcttgagacctttaataaggatgtaactcttcaggacagaaagacaaaagagaaatataagctgacggaagcaggtacagtgatcagtgagaagacggcaactctgacaggactgaaagtcggggataccatgaccatcacaaaggatgggaaaaattatgagacaaagatcgcagcagtgacagagaattacatgggacattatatttatatgacaggaaatgtctatgaacagaccttcggggagaagccgaactattctgcaactgttttcacggtaaaagaggagtacaaagaatcagaatctgaggtgggaaatgagatcctgaagcacccggctgcattaagcatcagctataccagcagtctggaggctcagcttcacagaatgcttggagcattggatacggtaatcatagtgctgatcatttctgcgggaatgcttgctttcgtagtcctgtataatctgaacaatgtcaatattacggaacgccagagagaactggcaaccctgaaggtactgggattctatgataatgaagtttctgcctatgtatacagggagaacgttatccttaccctcatcggcgtgctggcaggggctgtattcggaatctttttgcacagatatattatccgtactgtggaagtggatgcggtcatgttcggaagaaatattaatcctgtcagtttcctgtactgcggactgctgacaattggattctccatgattgtaaatctgtttatgcatcagaaattaaagaagattgacatggtagaatccctgaaaagtgtggaataaacgatttgtcgctttattgcggaaaagaagaaattgtttttctgtggtttttaaatatgtagtcaaacggatagaatggataagaggaagaaaggggaatattatcatgggaacagcaaatcagatagagcaggaattaatgagctatatatccgatcataaaatcaggaacacgcattcacatcatctgccggaacaggcgatggtggattttgatctggataagctgataaataatacgtatttacaatggcagcaggtaactccggggacaacagcagaaagcagaactgcatatctggaaaaaacacgatataaatcttattttgtctggcttcaaaaggcaatcggggagttgtatggaatatcggagccgatcacagctcagaactggaatcagatttcagatcagatcagaaaagcgcatcaaaatcccgacttttacatggatgtgctgaaaaataagtgtaagtatcaaaaagtaatcgtagatacctactggaatccgggctctgacaatggaagaccggaactgtttacgcctgcttttcgactggatctgttctttttgggctataaaaaaggacttcgcaatcatgacggtgtatcactggaagagaacttcggtgagctgccggacaatttacaggattatgtggagtgggtcagaaagtggatcatacaaaaaaagagtgagggctgtgtggccttaaaaatagcgatggcctatgagcgcagtcttcattttgaaaaagtgacgcgggagcaggctgaacgggtatttcgtttaaaagagtcggatataacccaggaggatatcagatgttttcaggactatttattctggaaaatatgtgaaattgcggcggaagtgtcacttccattacaatgtcatacaggaatggggcaagtcatagatacgaatatactgcaattgaacaatgtgataaaaaataatccggaaacaaagttcgtactgttgcattgcggctttccatgggtagatgatctcttttccatagtagacggatatccgaatctgtatccggatctgacctggcttccaatcttatcctacaccgcatcaaaacgtgtaatgcatcagttgatcgagatgtcccagattgataaaatctgctggggatgtgatacgtggacagtagaggaaagttatggctcccttcttgcattccgtttttcactgtgtagtgttctgagagaaaaaatagaggacggatatctttccgtaaataatgcaaaggatattattgataaaattttgttcgacaatgcgggaaaaatatacgtatgacaccagataaatttgtgaaattcggagaaacattcttgacaagaaagccttttttcattatagtagaatccagaaaaaggctgtgaaaaagaggagtaggcggtaatgccccacagagagggaagcttataagctggaaggtttcccgggaacagaagtgctgaaggtagctttggagccgggaggctgaagtgagtgtgtatgaatcatatcagagttatatacgcgcatggtaggttttcacgtatcccgcgttaagggaatgagagacaaactaaggtggtaccgcgatctatgtcgccctttgcacgtataatgcgtgtgaggggcgttttttatcgaataagtttatgacacagttatctggctggatgcggaaagcgaagtcagtatgcttatttgtttggttgtcagggtgactgctttataacggagtaatccgtagatactttagtttcagatatataattaggaggacattatgagcaaagaacttgcaaaaacttacgatcctaagggaatcgaagagcgtctttacacaaaatggatggacaatggatatttccatgcaaaagtaaatccggacaagaaaccgtttactattgttatgccgccgccaaacgtaactggccagcttcatatgggacatgcgctggatgaaactatgcaggatatcctgatccgtttcaagagaatgcagggctatgaagcattatggcagccgggaactgaccatgcagctatcgctacagaggttaaggttatcgacaagctgaaaaaagaaggcatcgacaaacacgatatcggccgtgaggaattcttaaaacatgcgtgggcatggaaagaggagtacggcggaaagatcatcaatcagttaaagaaactgggtgcttccgcagactgggagagagaacgtttcacaatggatgagggatgttccaaggcagtacaggaagtatttatcaaattatatgaaaaaggctatatctacaaaggttccagaatcatcaactggtgtcctgtatgccagacttccatctctgatgcagaggttgagcatgaggatcaggacggatttttctggcacattaattacccgatcgtaggggaagagggacgtttcgtagagattgcaactacacgtccggaaaccctgctgggtgatactgctgttgccgtaaatccggaagatgagcgctacaaggatctcatcggcaagatgctgaagcttcctctcacagacagagagattccggtgatcgccgatgaatatgtagacaaagaattcggaacaggatgtgtaaagatcacacctgcccatgaccctaacgattttgaggttggacgccgtcacaatctggaagaaatcaacatcatgaatgatgatgcaacaatcaacgaacttggcggtaaatacgcaggtatggatcgctatgaagcacgtaaggcaatggttgcagatctggaagaacttggacttctggtaaaagtagttccccacaatcacagtgttggaacacatgaccgctgcggtacaaccgtagagcctatgatcaaaccacagtggtttgtaaagatggacgagatggcaaaggcagcgatcaaagcactggatgacggagatctgaaatttgttccgtcccgttttgacaagacttaccttcactggcttgagaatatccgtgactggtgtatttccagacagttatggtggggacacagaatcccggcttattactgtgatgagtgcggtgaagtagtagttgcaagagaaatgcctgagaaatgcccgaaatgcggatgcacacatcttcatcaggatgaggatacactggatacctggttcagttctgcattatggccattctccacacttggctggccggagaaaacaccggaactggaatatttctatccgacagatgtacttgttacaggatatgacattatcttcttctgggttatccgtatggtattctctgctctggagcagactgatcaggttccgttccatcatgtactgatccatggtctggtacgtgactcccagggacgtaagatgagtaagtctcttggaaacggtatcgatcctctggaagttattgataaatacggcgcagatgctcttcgtcttactctgatgacaggtaatgcacctggaaatgatatgcgtttctactgggaaaaggtagaagcaagccgtaacttcgcaaacaagatctggaatgcttcccgtttcatcatgatgaacctggaaggcaagacagtgacagagccggagaacttaaatgatctctgtgcagaggataaatggattctgtctcacttaaatacagtgattcgtgaagcaacagagaacatggaaaaatatgaacttggtattgcagtacagaaggtttatgacttcctgtgggatgaactctgcgactggtatattgagatggctaaagttcgtctgtggaaggcagaggaagatccgaaggcagcaaatgatgcactctggacattaagaacagcgctgacagaaggcctgaagcttcttcatccgtatatgccgtttatcacagaggaaatctactgcacacttcttcctgaagaagagtctattatgatctccgaatggccagtatacagagaagaaagaaacttcccggatgctgagaaagcaatcgagggcttcaaagaggttgtaagaggtatccgtaataccagaacagagatgaatgttccgaataaccgcaagacaagcctgcatattgtggcaaaggatgctgaaacagcagcaatgtatgagaacagcaagaaatcctttgtaaatcttgcatttgcaaaagagattctggtacagacagacaagaacggaatcagtgaagatgcagtttcagtagttgtttccaatgcggttgtatatatgccgttggaagacctgattgacaaagataaagagattgaacgtcttacaaaagaaacagaacgtcttacaaaagagatcgcaagatgtgaaggtatgctgaataatccgaacttcgtaaacaaggcacctgctgccaaggtggatgcggagaaagacaaacttgcgaaatataaagaaatgatggataaggttaaaggacagttagagcagcttaagaaataagggagtgtttagatgaaattgtataagatttgtaacaaaatctcccttttactccatgtacttgccagcgcagcgggatattttgttatggaggcaatctgccgtcactcgtttatagaagcctggaattatatgacacagagacctctggtttttgcatataatgcggcattcatttttacctcgtcactaattgtttatctgtttcacaggagagtgttctggagaatccttgtgacattgttttggctgatactggccattatcaatggtgttctccttctcaaccgtgttacaccgtttacaggaccggatttgcatctgatcacagatgcaatgaagattgccaacaaatatctgcctgttgcaggcgttgtggcagtctgcatcctgtttgggattcttgttattttactgctgatgctgcttattaaaggaccgaagtatcagaaaaagattaaatatcgctacaatattcctctgatcttgctggctgttgctctttttgcaggaagtacacaactggcactggagaagagggtactttccaattactttggaaatattgcttttgcatatgaggattatggatatccttactgtctggcaactacgatttttaatacgggaatcagctgtccgagagattattctgagaaagaaatcaaaagaattgagaagacggaaaagaatctcccggaaacgcaggaagaaaagcgtccgaatattctgtttttgcagttggaatcattctttgatcctacgctggttaattacctgaatatttcagaagatccgattccgacattccgtaagctgatgaaggaatattcttcaggatattataaggttccctctgtcggtgcaggtactgccaatacagagtttgaatccattacaggaatgagtatgcattattttggacctggggaatatccttataagagtattcttagagagactacatgtgagagtgcaccttatgtactgaagaatctgggttataccacccatgcggttcataataatgaagcaaacttctatggaagaagatctattttcccgaatctcggatttgatacttttacttccgaagagtacatggcaagagagaatgagaagaatccaaatggctgggtaaaggatgaggttctgacggatgaaatcctgaaatgtctggattccactgagggaccggattatgtatatactatttccgtacagggacatggtgcatatccggatgagcagattctggaggatcctgagatcacagtttccggtgcaccgactgaggaagagaacaataaatgggaatattacgtaaatgagatccatgagatggataattttgtaaaagagctgacagataagctggcagattatcctgaggatgtggtccttgttatgtacggtgatcaccttccgactatgggactgactgtggaggacctgaagaacaagtatctgttccagacagagtatgtgatgtgggataacttcggacttaagaaaaagaatgaaaatcttgcagcataccaaatggcggcagaggttatggatcgtgtgggaatccatgagggaactgttttccgctatcatcaggcaagaagaaataccagaaattatcaggtggatctggaaaccctgcagtatgacctcctttatggaaagagatattcctacggggaaagcggcgaaagtccttatctgcgtaccagaatgcgtatgggaatctatgatgtgactctggattccattcaatgtatctctgaggcagatcatacatattacattaagggaacggaatttacgccgtccagtgaaatcaagctgaacggagaatggtatgatacggtctatatcaatccgactacgttgatgatcacaggtacggagctgaatgattttgacaggcttgcggtgatccagcgaagcaacagttcgacgcgaaaaccgctgagcaagagctatgaccggtcctgctatgcactttattcaaataataaatggaaattaacagaaagtgccggtacgaatgaaaattaatccataattttgtcggataaaatattacgattggtactggacatcttccaccactattatataatgttagagtaactaaatacattatagataagtggtggaatttttttatgaattacgaagaagcagttgcttatattgatgaaactccgaaatttacaaagaagaacagtctggatcacacaaaggaatgtctgagaagacttggtaatcctcaggataagtttaaggtgatccatgtggcaggaactaatggaaagggaagtacatgtgcgtttctgacctctgttctgagagaggcgggatattcctgcggattatttacttctcctcatctggtggagatcaatgaacgcttccagatcaatgaggtgaatattgataatgatactttcctgaaggcctttgagaaagtaaaggtacttgcggatgaactggttgcagaaggcagctatcatccgacttattttgagatgctttttctgatgggaatggtgatctttgcagatgcaggtgttgattatgtgactctggaaacaggactgggcggaagaatggatgcgactactgctgtggagaatcctgttgcctgtgtgatcacatcgatcagtctggatcatatgcagtatctgggagatacagttgccaaaatcgcaggagaaaaggccgggatcattgtgccgggggtaccggtaatctatgacggaaacgacccggatgcagcagaagtgatccgtgccagagcagaagaactgggaagccctgcttatgaagtgaagagatcagatacagaagtgctcagaaatacttcggcgggaattgattttgcatttcggaatgagtattataaggatatggttttctccattccgtttattgcaaagtatcaggtgatgaacagtgcacttgcattaaagacgattgaggttctgcagaatgtgatttctgtatctatggatcagatccatgtgggaattgccggaacacgctggcagggaagaatggaaacagtgcttccgggtgtgatcgtggacggtgctcacaatgaggacggggtagagaaatttgtagagacagcagaacattttcaaaaagaatgtccgctgactttacttttttcagcagtagatgacaaagattatacagatatgatacatacgatctgcagcaggatcacgttccgtcatgtggtagtaacctctgttggcggatatcgcaaggttcctgctgagagatttgcaaagctttttacagaagcaggtgcttcttctgtggaagtagtggaggatgttgagaaagcctttggtagagcactggaagtaaagggggatgacggaatgctcttctgcgtgggttccctgtatcttgtcggtgagattaaagatgtgatcaggagaaataagaaatgatagattatgaagaggaactgaagaaatttgaaccttgtctggatgtggcagatgcggagggtgcgatttatgagagagaactgacggatatcctggatattcttcaggaagttctccgcgaagccaagagtggcagacgggtaaaataaggagatacacatgaattgtatgaattgtggcgcatttctggtggacaaagatctggattactgcccgaaatgtggatgtaatgtgctgatccagaaaaaggtagattacctttccagacagtattacaaccgggggcttgagaaagccagtgtccgcgatctttcaggggcgattgactgtctgaagcagagtcttatttataataagcataacattcaggcgagaaatcttcttggactggtatattttgagacaggggaggtggttgccgcactcagtgaatgggtgatcagtaagaatcttcagccatccagaaatctggcatcagaatatattaacaagctgcaggcgaactccaataagcttgaggcgatcaatgaaacgatcagaaagtataatgatgccttaaatctgtgcagggaaggtcatgaggatatggctgcgatcaggctgaagaagattctcatacagaatccaaaactgatcaaaggttaccatcttctggcacttgtgcagatgaaagagggggaatataacaaggcaagaaagacgttaaggaaagccgcgcggattgataaaacaaatacaacaacccttcgttttttgagagagattgacgaacagacaggagtatccacacgtctggaacgtcagaataaaagaaacaggaaagctgtggacagcagtgagaatgatatggcaatccagattcctcagtataaagaaaaaggaaggattccgctgttttttacactggttgccggattttgtgcaggattgctggcgttttatcttctggctgttcctgccatacgtcagggaatctacagggaagcgaatcagcagattatgaaatacagtgatgcagtgtccagtcagggagctgagctgaccaaggcacagagtcaggctcaggaatctggagacacagttgaggcggcctccaaacagatagaggaagagaagaaaaaaagcagcagttatgaggctctgatcgaggcgtactcagcattgcagcaacagaatacagatgaagcggcattgaagatacagaatgtttatgcggatttgctgcctgcggatctgaaaggaatttacaatacgatctgtaacactacaggtacgaccgggatcgaaggaactacagatgcgaaagtcgcagacggaaccggcagtgaagacggtacggacagtggtgacagcgcagagggagatgtttcttcagattcagtggaagatggaagttatgacgatggttcctatgacagtggggaatatgatgatggttcttccgataattctgatggtgattcggcggatgacggaagttatgacaccggtgattatgacgattccggatattgatactatttttcattttgatgtggcagaagacatgaagtattataagaagatgtaaagatacaaaagagatgcatggaagtcatgtgtctctttttttaccgaatcaagtaggaggctgcgaaaagcaataaacagttgtttgatgtagagctacactgcaaagtggattgcgaacattcgcctgacaaaaagtgaggagggatatgatggagaacagatttgaaatacagggaaattccctgatcattcatttaccgaaagaggtagatcatatggtgacagacgagatacgcagagattcagatgatattatacggaaaaaatatatacgaacgatcacatttgatttttcaggaacagcgtttatggacagttcagggatagggctgatcatggggagataccggatgatggggatgcgcggtgactgtatacaggctacaggagtaaattcctatattgaaaagttgctgcatctgtcaggggtatataaatttgtcgaaatctgtggggaagtctaaagagagggggaagaaaactattatggaaaataccaatgaaatgaaaattatttttgacagcagacctgagaatgaggggctggcaagagttgcggcggcagctttctgcacacagctgaatcctactctggaggaagtggcagatctgaaaactgctgtgtcagaggctgtgacaaactgtattattcatgcttatgaaggccaggtgcagaagatagagattttctgcagaagggaagggcagaaattatgggttgatgtgatcgataagggagtggggatcagagacgttgcaaaagctatggagcctctttttacaacaaagccggagaaggatcgttccgggatgggatttacatttatggaagcgtttatggatgaggtaacagtagaatcacaggtgggatatggaacagttgtccatatgaaaaagacgatcgggaggtaggaatggaccatactcttgctctgatcatgaagtcacaacagggagataaagaagcaagagatactgtatttaaagaaaacgcaggacttgtgtacagcatggcgaaaagatttgccgggcgcagtgtggaaatggaagatatcgtgcagataggaagcattgggctgctgaaagccatagatcgttttgatatttcgtacgatgtgaagttttcaacttatgctgttcccatgatcataggtgaaatcagacgctatctgagggatgacgggatgcttaaggtgagcagaaacctgaaagagaactgtgccagaatttattctgcgagagaagcactggaaaaagaactgggacgtgaaccgatactggaggaagttgcgaaagcgacagaactttcagtagatgaagtggtgatgtcgatggaatcaggagctgaagtggaatctttgcacaaaattatctatcagggagatggaaatgatatttcgcttatggacaggctccaggaaaaagaaaatggacaggatgcagcactgaacaggatttttctggatgaaatcctgaaaaaattggatgcaagagaacgtcagctgatcggtatgagatattttaaggatatgacgcagacggagattgcggcagagatgggaatttcccaggtccaagtgtccaggatggaaaagcggattctgaaggaacttaaaaagcaggtataagcagatgggagtaattaactcaccgcttgtagaaggtggagtattctctgaagaggtaaataaaaaagaggttactgtgaacggagtgaacagtaacaaaaagagtgtgcggattactataatattgcacactctttttgctataatatctttattgttatatatcgtaagttatacagttctctgtgatctgaagatcacatttttgtatttcagaagggctgtctgaagaatcagtcctactacaccacaggaaactacttctccgatacctacggtaagcatcataagcggaatcggaagatttactccgtatccgaagtgaagtacgaatggcacgatgactgcattggaaacaatcggcgggatcggcgcaagaaaacggttgcagctgcggagtctgtaagtaaatactgctccgatcagtgttgcgatgcttccgaaaataatgtctacaggaatggcaccgccaaagagattggcaatgatacatcccacaaataaccccggaatcgcagccggtgtaaagaatggcaggatggtcagtgcttccgaaaagcgaatctgaatttcgccatagctgagtggtgcgaataaaagagtcagaaccacataaatagctccgatcactgctgcttctgccagaaactgagtacctttgtttttcatatttgattatctcctttagtatttgttttacgagtggaaggtttcgaacactcggctatcgaagtatatcacttttcggaagtacggtcaatgtctttgataagagttttattaacattttcctcgtacagacgcatctgtatctgcataggtgttggatcatctgttattttcatatgaccgaaatgattgaagaagaaaagtaccccaagtccgattcctatggaataagtgatctcaagaacagtaaaatgaccggaggtctgtcctgtgacctgggtatagatctgtgagaagagaccaccgacatctacatcgttattaaatgtcatgatagagaaacctgcaccgaaaaaggcggcaagaccgacgaaaataatcttgcaccactgccagacaagtccgggaccgggtttgtttttaaaagtgatgataaagtcggcttctccaatattactgatttcaaggtcgggttctttttttttgatttcggagatcagatccatgacagacattacataacgtcctggtttatccggatcaagatttataactggcatcacccggagtcggttcaggattttactgttgctgcaggaaagttttgcaatgtcctgcagataaatgtgtggatggtttatctggatattctgatctaactgtaaatagagagtatcactcatggtatgttatcctttcattttgggcttaaagatcaggcttgcaagataagagaagatcagtgctgcggagactcccaccgcgcaggcggtaaagcctcccataaagagcccgatcagtccgtttttgtcaatggattctttcattcctttccacaggatattgccaaaaccaagcagtggaacagaagcacctgctccggcaaattctgcaaatggctgatagatcccgacagcgcttaaaacagaacctgtacataccagaagtaccatgatccgtccgggcataagctttgttctgtccagaagaatctgtaccagggcacagatcagtccgcctgtccagaatgcattaaaatagtccatgtatttttcctcctgaaaaaatttctgtatctacatcatatccggaaccctgtactgttctattacaacagcgtgtgcgataccgggaataggatctccctcgttgaagcttacctttgacagaagggcacctgtgggaacaaagagaatccttttccattttttctgtataatacccggaagaatatagcctgccagaacagaggcggcacatccgcatccactgccgccggaatgtgtatcctgagtctgaggatcatagatcagcataccgcagtcctgatggacagatgagatatcaaatcctttttctgtgagaaggtcgaacaggattgtctgtcctaccatgcccaggtcaccggtgaagatggcatcataatcggatggttttcggtgaaaatcctgaagatttcgggctatggtgtcgcaggcagcaggagccatgcaggctcccatattgagggaatccctgaacccaaagtcaatcagtcttccggtggtgattcctgttataactgcacagatattgcggttacggagtgtgtttagtgttttgttgtccgggcgtggtggcggttcatatccaagtatacaggctccggcaccggtgactgtccaggtagcagataagggcctttgatttccatatcccaggggaaaacgaaattctttttctgcgctggcaaagtggctggaagttgcgcagaggatatattttccgtacccgccgtcgatacacattgaaccaagggaaagagactctcccatagtggagcatgctccgaaaagaccgtaaaaaggaattttcagatcagcggttccgaaagaagaggctgatgtctgagccagcaggtcgcctgcaaaaagaagctgtatatcggaacaggtgaggccgttttttttgattgccagcagagcggcctgtttttgcagagtgctttctgcagcttcccaggtatctgttccaaacatgggatcttcacatatggtatcaaagtatgcgcccaatggcccttccccttctttccggctgacaacagaagcacagctctgaacaaagacaggattttgaaatgaaatgctggatgtaccgcaggtcatttgtctgttcatagaaaacctccttgtataattgtatgattcttatgcaaaaacacctctcaggatatggatgctgaatagttacgggatcattgtaaaaagataataaatcacaccgagaatccatgaactcaggattccataaagaattacgggtcctgcgatcgtaaatattttgcatccgatgccgaatacctgtccttctgccttatattcgatcgcagaggaagctacggaattggcaaaaccggtgatcgggacaaggcttccggcaccgccgaatctgccgattttggaataaagattacatcctgtgaggatcacactgaaaaggatcaggataagggaacaccaggagccggcggtatctttgtccagcccaaggttatctgcgtaatttaagatgacctgtccaacaacacagatgactccgcctgtgaaaaatgctttgcacatattcagtggcaggctgtggacaggagtgactgcttttacgtattcttcatattgtttctgttttttctgattgagattattgtctgacataatataaaacctttctgattgaaaatccggaattttggcacactgagtaaagagtaatcgattgctgcttttttggcactgatgttaaagattagctggaaattatggcagccatccgttataatagtaaatcagtgccccgacagttttgccggcggctatgcacaggattgtaaaagaaagacctctctggaatctgcttcttctggcaaagatagggaaaatatctgccatctctgccagggtcatgatccatccaccaaggaaaatccctgaaaagagcccgtacagaatcagaaacggggtgccgaaccggatattccagtgaaaaagaaagaacaggtttccaagttctgttccccagaatgtgatgtcttcgtacagcaatatatgatctgctgtgtgggtaattcctgcatatctgggaataatagaaaggccgatcataagaccggttagtcctccggcaataataaaaccggaacatagtcctgtaaatccgagaaaaatctgctctaacataagtgcctccgatcctgccgacaacaaaagaagtttccaggtaactgtccggcagtctgttattgtgaagcaccggacagatatatctgtgatatgtattatggcagaaatataaaaatatatacactgtcattcatttgttgctgagaacagagtgaacagtaaccctagtacatcgtttcgtaaataactataccaatcgcgtaggatgcggattcgagtgtgctggtataaaaacgcaggcgtagcgggctacgctgaggcttttagacctgtgcaatcggattcgcagacaagtgagtggtatagttatttcgaaaacgatgtactagtaatatatccggcagcaaaagagtgtatgaataactgtacttttggagagagagatagtataatgttactgttcacacaccgctatcccgcgaggtatttttgcatgaatgtgccaaaatcctgagacatacaagccaaaattctattgccgcaggcaatctggaatgaattttggttaagttactgagaacggagtgaacagtaacagtataatgactgtattatctgacgctgcaggaactgatcggaaaattcgacagaatgaaaacgtcaaaagaaacataataaatcataataaatatagaaagattgaggaatgaaatctgtgaatcagaatataatagagaaatttaatgatctgctgggagaagagaaagtgaaagtggatgaacccatgaaacgtcataccacatttcggattggcggtccggcagattactttttgcttccgtcttctgaggaagaactgagcgggattctgaagatatgcaaaaatgaagaactgccatatttcattcttggaaatggaagtaatcttctggtaagcgatgaaggatacaggggtgtcattattcagctttacagaaattatggcgatattacagtaaaaggaaatgaaatccatgcaacagcaggagctctgctgtcacagatcgcggcggcagccaaaaatgcgtcgctgacaggatttgagttcgccggaggaattcccggcacattaggcggtgcagttgtcatgaatgcaggtgcctatggcggtgaaatgaaagatgtgctgaaagaagtcactgttatgacagctgcaggagaaattctcgtacttccggcagagaagctggaaatgggatatcgcacaagtcttgtgaaaacaaaaggatatctggtgttgagcgcagtgatcgttcttgaacaggggaatcaggaagccataaaagcaagaatgaaagaactgacagaacagagagtaagcaaacagcctcttgaatttccaagtgcgggaagcacattcaaacgtcctgaagggtattttgccggaaagctgatcatggatgcagggctgagaggataccagacaggcggtgcacaggtttccgagaagcactgtgggtttgtgatcaataaagataatgcaactgcagcagatgtgtgcagactgctcagagatgtacaggataaagtaaaagaacagtttggcgtaactcttgaaccggaagtgaaatttcttgggaaattttgatctgactgaatcgaaaaagtactgtgaacagagtgcaaagaccaaagaccaatgagcaacagatgagattaagaagtgacgggagatagaaaatgcgttttgtaatagttacaggagtatcgggagcaggaaaaacatctgcattgaaaatgttggaggatgcgaagtatttttgtgtagacaatctgccgatccctttactggagaaatttgcatcactgatgcctgagatacatggagaagatgtgcagaatgttgcactggggatcgatgcaagaagcgggcgttctctggatgagctggagattgtactggacagaatgaaaaaggcagggtatgattttgaaatcctgtttctggatgcgcaggacagtgttctggtcaaacgttataaagaaacccgcagaagtcatcctcttgcaatggggggaagagtggatgatggaatccggatggaaagagagaagatgcgttttctgaaagagcgtgcggattatatcattgataccagcaatcttctgacaagagaactgaaacaggagatcgacaggatatttgtagataatcaggatttctgcaatatgatgatttctgtactgtcatttggatttaaatatggaataccggcagatgcggatctcgtgtttgacgtgcgtttcctgccgaatccatactatgtggacgaactcagaccgctgacagggctggatgacagggtttttaattatgtaatggattgtgatatagccaggacatttgcggataaactggaagatatggtcaatttccttattccgaattatgtgaaagagggaaagacaaatctggtgatcgcaattggatgcacaggcggcaagcatcgttccgtcacgctggcaagagaactttattccagattgtctggaaatacaaaatacggattcaggctggaacacagagatgcacagaaagaccgactggtcagaaaacaggaaggatgataaaggagagatgtctttttcagggatggtgaaggaagaactttccagacagattggattggccagacattgcaaaatggcagaactggctgcgattttatgttcctgtgggaaaatggaatgtttttcaggggacagtaaactgaaaatccagacggaaaatgaagcagttgcaagaaagtgctttacattattgcaaaaaacatttaatatagaaacaaagatatttgtacgtgagaacagtcacttgaaacgggtgaaggtatatacaatagaaataactgatcccgaagaaatccaggtaatttttcaggcactgcggcttgtcacgaacagtatcgaccagggtacgcttgtattgtcggatatgctggtggtacagcagaattgctgcaaacgggcgtttatcaggggagcttttttagcatccggttcaatcagtgatcctgagaaggggtatcattttgagattgtatgttctgatgcaaaaagagcagagcagctacagacgatcatccgcagtttttcggtagatgccaaaatcgtacagcgtaagaaatcacatgtggtctatgtgaaagaaggtgcgcagattgttgacatgcttgctgttatggaagctaatgtggcattgatggacctggagaacatccgcatactgaaggaaatgagaaattcagtaaacagaaaagtaaactgtgaaactgcgaatattaataaaaccgtaaatgcagccgtcaagcagatggaggatattaagctggtccggcagaaaataggatttgagcagcttaatgaaggacttgcacaggttgctgaacttcggatgcagtatccggaagctacactaaaagaattaggaatgatgttaagcccgcaggtgggcaaatcgggagtcaatcacagactgagaaagctgagtgcaatggctgacgaactgcgggagaaacaaggaggagaattattatgatcaaaaaaccaatcaccatcaatttatccacaggtctggaagcgcgtccggtggcacagttggtacaggtggctagtcagttcaacagtgagatttatgtagagattggaaagaagcgcgtgaatgcaaagagcattatgggtatgatgacgcttgggcttgatgcaggggaagaaattactttatctgcaaatggtgaggatgaggaagctgctatggcaggtattgagcagtacttaagtaatcagtgatcaaatagtattcaggatagaacacatccggaagggaagaccgcttttcggatgtgttttgtcgtgtatacgacagcaatgttactgttcactttgttcacagtaacgtagccaaaattcattccagattgcctgcggcaatggaattttggcttgtatgtctcgggattttggcatattcatgccaaaacacctcgcgggatagtggcgtgtgaacagtaacacagcaatcaattgcattgccataacaataacattagattgaccataaagataaaacagggtataatgagcgaaaagagtagaaatgaggagcgtaacaaatgtcaaaatttctgaaatttattgtacattttatagtgatatgcaccattgtctgtgttgtcgggctggcagttccgccgtttttgggaattacgacagagattatggatgattccggcaaagaaacgaatctgcccatgggatcggttacttatgcaattccggtaaagatcaaagaggcagcggttggtgattctattctgtatcagactgattctaaagcataccgttatatgattacggaaatggataaaaagaatcatatttttaaggtgatagattccagtgacaaagatgcagaacctgttgccgttgaggtgaaggattacataccgaaggttgtgatcacagtaggatatgcaggatatctccttcttgcaacagaaagcattgagggacttattattctcggacttgccgtccttttcctggtaattctgtatatagttgcggaacttctgaaaaaagaaccgcaggatgattatgatgaaacagatacagaacccggatatgttaagagcaagaaggaacttaagagagaagagaaggcaagagagaagcgttataaagaagaggaacgccagattaagaaagaggaaagggcacgcaggaaaggaaaggctccggaacgaaagaaaattaaaacaggcggttttgtggatgaaatctatgaagatgagttggaacctgtgaagcctgcgcagccggaaacaattcagactgcgacaagcgaagcccatgaacttctcagaaaagagattgcagcagctacggcggatgtaccggtaaagcaggaagaatctgtacagacgaaaccggatgcaggtgatatacatatggagcctgtttccggaaagacagaagtgatcgtgcctcaggtaaaagagcagctgaaacagatgatgaatgcttcggacagaaaaccggtagaagcagaggaaacagaaggaaacgcacaggaagaaatcaggcgtatggtaattccgacatggtcggcagcacagattgccgagacagccagaagtcagggcgatgcgccggatattgtgagagacgatgttacaaaggttacattatttgattattccgatatcattgcggatgagaaaccggtttatccgcagaaacagactgctgaagaataaaataagagattgaaaaaatatgacgatgaaaagaacgtgtttcttcttatatataatatagaaggaacacgttctttttactgcagacaatccgatctccatcatatcgtgaagtcctgcgtcagcagacctgcagatatcggccttgtcgttcactattccgtaatgtttctatataataaagccactagtacagcaaaaattaagtttctgctatattgacgcaggatgatttcttcagctgcaaggcggaggaatgaggcgtagcggtggctacggcgattgacgacaacgccgcagatgaaaaatcagacaagtcaatatagcagttacttaatattcgctgtactagtatgccgacaagttgattcttttttgtttcgacatacaagcccaaattcaataaaaaattgtacggaatcaagtacaaaaaaatatcaaaaaaagtgaaaaaaacacttgcatttttctgagaggtcgtgtatactctcaattgttgtgacattgatagcaatgaagcgcgaggttgctgccacagagatggcaggttttccgtggagcgaatgtcaagtttgaaaactgacgacaagtcactgtacaagttcagaagaccatccagggatggcgtgtgtggtaaaaaatcgaaagacacacacggagatgtgtacagtcgccgcttgtcgtactgcttgaaaagtacgaataggaggagactttttttatggcaaatcaggtaatgagaatcacattaaaggcttatgatcatcagttagtagatgcatcagcagcaaaaatcatcgagactgttaaaaagaacggagcaatggtaagcggaccggttccacttccaactaagaaagaggttgttacaatcttaagagccgttcataaatacaaagattccagagaacagttcgaacagagaactcataagagactgatcgatatccttacaccaacacagaagacagtagatgctctgtcaagactggaaatgccagcaggtgttaacatcgatatcaagatgaagactaaataattagtcatcaaccccaatttgataatgctctaagcattaagctatttactatatgattgccggtaatcggtaatccgctataaggaggaagaaagaatgaagaaagctattttagctactaaagtcggaatgactcagatcttcaatgaagacggccagttgattccggtaacagttttacaggctggtccttgtgtcgtaactcaggttaagacagaagagaacgatggatacgaagcagttcaggttggattcggagacatcagagaaagccttgttaacaaaccggaaaaaggacactttgacaaagctggcgttgcagtaaagagattcgttaaagagttcagatttgataacgctgctgaatatacagtaggacaggaaattaaagctgatatctttgcagacggcgatcacattgatgcaacagctgtttccaaaggtaaaggtttccagggtgcgatcaagagacatggtcagtcaagaggacctatggctcacggttccaaatatcaccgtcatgcaggttccaatggtgcttgttctgatccgagcaaggtattcaaaggaaaacatatgccaggtcatatgggaaatgttcaggttactgtacagaaccttgagattgtacgcgtagatacagaaaataacttactgttagttaaaggtgctgttccaggacctaagaaatctttggttactatcaaagagacagtaaagtccttataataagaaaggaggagcacacaaatggcaaacgtaactgtttataatatggaaggcaacgaagttggaacaatggaactgaatgatgcagtattcggcgtagaagtcaatgagcatcttgttcaccttgctgttgttcgtcagcttgcaaataatcgccagggtactcagaaagctaaaacacgttctgaagtaagtggcggcggaagaaaaccgtggagacagaaaggaacaggtcatgctagacagggttccatccgtgcaccacagtggactggcggcggtgttgtattcgctccggtaccaagagattatgaagtaaaaatgaacaagaaagaaagaagagctgctttaaaatctgctctgacttccaaagttcaggacaataaattagtagttgttgatgctcttacattagcagatgttaagacaaaggaaatgcagaaagttcttacaaacctgaaagctgagaaagctctggttatcacagcaacagatgacaagaacgtaatcctttccgcaagaaacatcactgatgttcagactgcaactccaagtactatcaacgtatacgatgttatgaaccacaacaccgtaatcgtaaccaaagatgctgtagcatccatcgaggaggtatatgcataatggctgatatcaagtactatgacgtaatcaagaaaccagtgattacagaaaaatctatgaatgcaatggctgaaaagaaatacactttcttagttcatccggaagcaaacaaatctcagattaaagaagctgtagagaaaatgttcgaaggaacaaaagtaaagagcgttaacaccatgaatatggatggaaagaaaaaacgccgtggtatgacagttggaacaactgctaaaaccaaaaaagctatcgtagctctgacagaagacagcaaagatatcgaaatcttcgaaggactttaattgatagcccatgcggtacgagtgccacttcggaagctttgcttcttatgaatcctcggcactctgattatcgcgagtatacgcattcaaaagcgtgaggacaaatttgaaaggagaacaaaaatgggaatcaaaagttataacccatatacaccgtctagaagacatatgactggttccgatttctcagagatcacaaagtctgcaccagagaaatctcttaccgtgtctttaaagaaaaacgctggacgtaacaaccagggtaagattacagttagacaccgcggaggcggaagcagaagaaaatacagaatcatcgacttcaagagaagaaaagatggaattcctgcaacagtagtttccatcgagtatgatccaaacagaacagcaaacatcgctttaatctcttatgtagatggcgagaaagcatatatccttgcaccggaaggcttaaaagtaggtcagaaagttatgaacggagctgatgcagaagttcgtgttggtaactgcttaccattagagcttatcccggttggtacaatggtacacaacattgagcttcatcctggaaagggcggacagatggttcgttctgctggaaacggcgctcagttaatggctaaagaaggcaaatacgcaacactgcgtctgccatctggtgaaatgagaatggttccaatcgtatgccgcgcatctgttggtatcgttggaaacggagatcacaacctgattaacatcggtaaagccggacgtaaacgtaacatgggtatcagacctactgttcgtggttccgtaatgaacccgaatgaccatccacacggtggtggtgaaggaaagactggtatcggtcgtccaggtccatgcactccatggggaaaacctgctcttggtctgaagacaagaaagaaaaacaaaccgtccaacaaactcatcgtaagaagacgcgatggaaaagctttaacgaaataataaggaggattaagcatgtctcgttcactgaaaaaaggaccttttgcagatgccagcttacttaaaaaagtagatgcattaaacgctgcaaatgataaatccgttatcaaaacctggtcacgccgttctacaatcttcccgtccttcgtaggacacacaattgctgtccatgacggaagaaaacacgtgccggtatacgtaacagaagatatggttggccacaaactcggtgagttcgttgcaaccagaacttacagaggacacggaaaagacgaaaagaaatccggagttcgctagtatttgactttatattctgtctgctgcccatgagacagcggacaggttaacctgatattgagagaaaaaggaaaggaggcactttaaaatggcaaagggacatagaagccagataaaaagagccagaaatgagagtaatagagagacaagaccgtctgcaaaattatcttatgcaagaatttctgttcagaaagcctgctacgtgttagatgtaatccgcggtaaagatgtgcagacagcacttggtatcttaacatacaacccaagatacgcttccagcgttatcaagaaacttcttgagtcagcaattgcaaatgctgaaaataataatggaatgaatgcagacaacctctacgttgcagcctgctatgcagataaaggacctacaatgaagagaattcagccaagagcacagggtagagcttacagaatcgagaagagaacaagccatatcaccatcgtgctggatgaaagataaggaggaaaagcatgggacagaaagttaacccacatggccttagagtcggtgttatcaaggattgggattcaagatggtatgctgatgcagacttcgctgattacctggtagaagactacaacatcagaacattccttaaaaagaaattatacagcgcaggtgtttccaagattgagatcgagagagcatctgacagagttaagatcatcatctacacagctaaacctggtatcgtaatcggtaaaggcggagctgagatcgaaaaagttaaagctgaattaaagaaattcacagataagaaacttatcgtagatatcaaagaagtaaagagaccagacaaggatgctcagttagtagcagagaatatcgcacttcagcttgagaaccgtatctctttcagacgtgctatgaaatctacaatgcagagaacaatgaaggccggagctaaaggtatcaaaacatccgtatccggacgtcttggcggtgctgatatggctcgtacagagttttacagcgaaggaactattccgcttcagacacttcgtgcagatattgactatggattcgcagaagcagacacaacatacggcaaagttggcgtaaaagcttgggtctacaatggcgaagtacttccaacaaaaggaactaaggaagggagcgataaataatgttaatgccaaaaagagtaaaacgtcgtaaacaattccgtggctccatgagaggaaaagcccttagaggtaataagatcaattatggtgaattcggacttgttgcaaccgaaccgtgttggatccgttccaaccagatcgaagcagcccgtgttgctatgactcgttatatcaaacgtggtggtcaggtttggatcaagattttcccagataaaccagtaacagcgaaaccagcagaaacacgaatgggttccggaaaaggtgctctcgaatactgggtagcagttgttaagccaggacgtgtaatgttcgaaatcgcaggcgtttccgaggaaatcgctcgtgaagcattacgtcttgcgatgcacaagttaccatgtaaatgtaaaatcgtttctcgtgcagacttagaaggcggtgataacagtgaaaattaataaattcgtggaagatttaaaggcaaaatcagctgcagaattaaatgaagaattagtagctgctaaaaaagaacttttcaatctgagatttcagaatgcaactaatcaattagagaatacaagccgcattaaagaggttcgcaagaacattgcaagaatccagacagtaattactgagcaggctaacgcttccaaataataggaggaaactatcgtggaaagaaatctgagaaaaacccgcgtgggtaaggttgtcagcaataagatggacaagaccattgtagttgctattgaagaccatgtaaaacatcctctttacaaaaagatcgtgaagagaacatataaattaaaagctcatgacgaaaacaatgagtgcaatatcggtgataccgtaaaagttatggaaaccagaccgttatccaaggataaaagatggagactggttgaaatcgtagagaaagttaaataaggaggaaaccagtatgatccagcaggaaactagactgaaagttgccgacaacactggtgcaaaagaaatcctttgtattcgtgttatgggcggctctacaagaagatatgcaagcattggcgatacaatcgttgctactgttaaagatgcaacaccaggcggcgttgttaaaaaaggtgacgttgtaaaagctgttgtagttagaactaaaaaaggcgctcgtcgtaaagacggatcttacatccgtttcgatgaaaatgctgccgtaatcattaaagacgacttaactccgagaggaacacgtatctttggaccagttgccagagagcttcgtgaaaagaaattcatgaagatcgtttccttagctccggaagtattataggagggtgcctaatgtcagctatgaaaattaaaaaaggtgatactgtaaaagttatcgctggtaaagataatggcaaagagggtaaagtccttgcagttaacgcaaaagacaataccgttgttgttgagaatatcaacaaagttacaaaacacagcaaaccatctgctgcaaatcagcagggcggaatcattacaaaagaagctccactgcacatctccaacgttatgctggttgttgatggacaggctacaagagtaggattccagatggacggcgacaaaaaagtccgcgttgctaaaaagaccggtaaggttatcgattaattaagagaggaggcatgacaagtgagtagattaaaagaaatgtacaaaaatgagatcatggatgccatgaccaaaaaatttggatacaaaaatgttatggaagtgccaaaactcgacaagatcgtaatcaatatgggtgttggtgaagccaaagaaaacgctaagcttcttgatgctgcaatcgcagatatggaacttatcacaggacagaaagcaatcgctactaaagctaaaaaatctgtcgctaactttaaaatcagagagggtatgccgatcggttgtaaagttacattaagaggagaaaaaatgtacgagttcgctgatcgtctgatcaaccttgcacttcctcgtgtacgtgacttccgtggtgttaacccgaacgcattcgatggtcgtggaaactacgctctgggtatcaaagagcagctgatcttcccggaagttgaatatgacaaagttgacaaagtaagaggtatggacatcatcttcgttactacagctaagactgatgaagaagctcgtgaattactgacattattcaatatgccgtttgcaaaataataggaggaacgattcatggctaaaacagcaatgaaaatcaaacagcagcgtaaacagaaattctccacaagagaatatacacgttgcaatatttgtggacgtccacattctgttttaagaaagtacggaatctgcagaatctgcttccgtgaattagcttacaagggacagatcccgggtgttaagaaggcttcctggtaggaaccggatttaaataaaataaacgatcggctgatttatcagtccgatcatatgtccaaacgagatttatgataaaacaggtaacaatgtaaacaattaatatatatgcacatgtaaagtctgaataacaggaggaaactaacatgacaatgagcgatccaatcgcagatatgcttacaagaatccgtaacgcaaacactgcaaaacatgacacagtagatgttccggcatccaaaatgaaaactgcaattgctaacatccttgttgatgaaggatatattgcaaaatatgatttagttgaagacggagttgttaaaactcttcatatcacactgaaatacggtgaagacaaaaacgaaaaaatcatcactggtttaaagagaatttccaaacctggtcttcgtatctacgcaggtaaggatcagcttccaaaagttcttggtggacttggaatcgcaattctttctacaaacaaaggtgttattactgataaagaagctcgtaaacttcaggttggcggcgaagtattagcattcgtttggtaatttgaaccaagattttttatagagaacaaactgaaaacagagaggatgaaacatcctctccgataatctaagtaaggaggacaaacatatgtcacgaattggtagacttccggttgctattcctgcaggcgtagaagtaactgtcgctgaaggcaacgtagtaactgtaaaaggaccaaaaggaactctcgaaagagcacttcctacagaaatggaaatcaaagtcgaagatggtcatgtagtagtatccagaccaaacgacttaaagaaaatgaaatctcttcacggtttaacaagaagcttgatccacaacatggttgttggtgtaagcgaaggctatacaaaagagcttgaagttaacggtgtaggttataaagcagcaaaacagggcaaaaagctcacacttagccttggatattctcatccggtagaaatggaagatccagacggaatcgaaaccaaagtagatggtaacaagattatcgtatccggtatcagcaaagaaaaagtcggccagtttgcagctgagatcagagacaagagaagacctgagccatacaaaggtaaaggtattaagtatgttgatgaagttatcagacgtaaagttggtaagactggtaagaaataattcaggagggtgagaaaatggtaaataaggcatctagagcgaaaattcgtgagaataagcatagaagattacgtcatcatttaaacggaactgcaacaacaccacgtttagcagtatttcgttccaacaagcatatttatgctcagatcattgatgacactgtaggaaaaactttagtatctgcttctactcttcagaaagaagtaagagctgagttagagaacactgatgatgtagcagcagctgcacatttaggaaccgttattggtaagaaagctgttgaagctggcatcgaaagcgttgttttcgacagaggaggctatatctaccacggtaaagttaaagcactggcagacgcagcaagagaagctgggctgaaattctaataaggaggagcgaaacacatgaaacgtaatcttattgatgctagtcagttagaattagaagataaagtagtatcaatcaagcgtgttaccaaggttgttaaaggtggtcgtaacttccgtttcacagctttagttgttgtaggtgacggcaacggacacgttggtgcaggtttaggtaaagcagccgaaattcctgaagcgatccgcaaaggaaaagaggatgctattaagaaattagtaacagtagcaagagacgaaaacaactctattacacatgacttcgttggaaaatacggaagcgctgaaatgcttctgaagagagctccggaaggtactggagttatcgccggcggtcctgcccgtgcggtaatcgagttagctggtatcaaaaacattcgtacaaaatgtatgggatccagaaacaaacagaacgttgttcttgcaacaatcgaaggcttaagacagttaaaaactccggaagaagttgctagacttcgcggaaaatctgttgatgagattctggcttaaggaggaaatacaaaaatggcaaacacattaaaagttacattagtaaaatctcctattggtgcagttccgaaacacaaaaaaactgttgcagctatgggtcttacaaaaatgcacaaaacagttgaaatgccggataacgcagcaacaagaggaatgattcagcaggtacagcacctggtaaaggttgaagaagcttaattgcgatttaaccagagagaattctgatatggatctgatatgaacctgttattcgcagagaatggcaggagcatacagaaacatattcagacacaatacaatctgaacttatagatttgaaataataataaggaggtgccaacatggaattatcaaacttaagaccagcagaaggttctaagcacagcgataacttcagaagaggccgtggacatggttctggaaacggtaaaacagccggtaaaggacacaaaggacagttagctcgttccggtcacaagaaaccgggatttgaaggtggtcagatgcctttatacagacgtctgcctaagagaggattcaaaaacagaaatacaaaagagattattgcaatcaacgttgacgtactgaaccgttttgaagatggtgcagaagttacagcagaaagcttacttgcaagcggtgcaatctccaagatcgctgatggcgttaaaattcttggaaacggtgagctgacaaagaaacttaatgtcaaagtaaatgctgtcagcgagactgcaaaatcaaaaattgaagctgctggtggtacagtagaggtgatctaatgtttgaaactcttaaaaatgtttttagagtgaaagaaatgagacgcaagctgttgtatctgatatggatgatttttatcatccgtatcggctgccagattccggtaccgggagttgacagtgatttcttcaaacagtggttcagcagcaatgccggtgatgcattcaatttctttgatgcatttaccggtggttcatttgaaagaatgtcaattttcgcattaaacatcacaccatatattacatcttccattatcattcagcttcttaccattgcaattccggcactggaagaaatgcagagagatggtgaagagggaagaaagaagatgactgcgatcacacgttatgtgaccgtaggtcttgctttatttgagtcaatcgcaatggcaatcggattcggacgtcagggtatgattccgaatctggacttctttaaaggtgttgtagttgttgcctgccttacagccggttcagctatgctgatgtggctcggtgagcgtattacggaaaaaggcgttggaaatggtatttccatcgtacttaccattaatatcatttccagagtaccaagcgacctgacattactgtatgagaactttattaaaggaaaaacaattgcaaagggtactcttgcaggactgatcattgcagccgttattcttctggtagtagttctggtacttatccttaacggagcagagagaagaattccggttcagtattccaagaaaatggttggaagaaagctgatgggcggtcagtccaccaatattccgctgaaggttaacaccgccggtgttatcccggtaatctttgcatcctccattatgtctttcccggctgtcattgcgcagttaacaggaaaaggtaatggtacaggaatcggaagtgagattattcgtggtctttcttccaataactggtgtaatccgaaacagctccagtatacatggggattggttctttacatcgtactttgtgttttctttgcatatttctatacttccattacattcaatcctctggaagtagcagataatatcaaaaagcagggtggatttattccgggtattcgtcctggaaaacctacgtcagactatttgactaatatcttaaattatattatatttataggtgcagtaggtcttatcattgtgtgcgtgattccgttcatctttaatggtgtattcggagcgaatgtttcattcggtggtacatctatcatcattattgttggtgttatcctcgaaactgtgaaacagattgagtcacagcttctcgtacgtaattacaaaggctttctgaacaattaaaaatgagaggttgtggtgcatggcatcacagccttgatttgctaaaaaagaaaacggagggtataacttatgaaaatcattatgttgggtgcaccgggggcaggaaaaggaactcaggcgaagaaaattgctgcgaaatatcagattccgcatatttctaccggagatattttccgcgcaaacatcaaaaatggaacagaactgggtaaaaaagcaaaaacttatatggatcagggacttctcgtacctgatgaactgacctgtgatctggttgtggacagaatacaacagccggatgcagcaaatggttatgtgctggatggttttccaagaacaattcctcaggcagagtgcttaacagaggctctgaacaaactgggaagtaaagttgattatgcaatcgatgtggatgttccggattccaatattgtaaaccgtatgtccggaagacgtgcctgcctgaaatgtggtgctacttatcatgttgtacatgcagcaccgaaggttgagggcgtttgtgatacctgtggagagaaactggtgcttcgtgatgatgaccagcctgaaacagttcagaaacgtcttaacgtatatcatgagcagacacagccgctgatcgattattatactaaagagggaattttaaaatcagtggatggtacaaaagatcttgaagaagtatttgcagatattgttgccatcctgggagagtaattgggtgtttttaaacaccatctggaggtaaaatgtcggtttctatcaagacagaacatgaaattgaacttatgagggaggcaggtcatctgcttgaaaaagtgcatgatggtctgatcccttacattaaaccgggagtgagcacaaaggagattgaccgtatcggagaacagatgatacgtgatctgggatgcatcccgaatttcctgaactacggagggtttccggcgtcattctgtatcagtctgaatgatgaggtagttcatgggatcccgtctgaagagaagatcattcaggagggagatcttgtaaagattgatgccggtcttatttataaggggtatcattctgatgcagcgaggacttatgctgtcggtgaagtttcaccgcaggcacgtaagctgatggatgtgaccagagagtgtttctttgagggactcaaggccgcacgtgcgggaaatcatctgaatgatatttccaaggcaatcggtgctcatgctgccaaatatcattatgggattgtccgcgacctggttggacatggaatcggcactcaccttcatgaggatccgcagatcccgaattttccgcagaagcgaagaggagttcgtctgatgccgggtatgacacttgctgtagagcctatgatcaatctgggacgtgcagatgtggcatggctggatgatgagtggactgttgtaactatggatggttctctttctgctcattatgagaatacgattcttattacagacggagatccggagattctgactcttacgaaataattggacgacatacaggaggtttaaaatgtcaaaagcagatgtaatcgaagtggaaggcactgttctggaaaagctgcctaatgcgatgtttaaagtggaactggagaacaaacatgtggtgcttgcacatatcagtggtaagttacgtatgaattttattcgtattcttcccggagataaagttacgattgaactgtctccgtatgatctgtctaagggcaggattatctggagagataagtaagaaatattggactgcagttggtgcagtgatgagaaagagagctggagggatctggttctctttttttgtgctgtaaagggggacgcgtagaaaaataattcatttcatgtgcggtttcggcatctaagatattctaagctttcataaatctgctaaaagcatgaggaaatcaggtcaaactcgcttcgctcagacagtgacctgattttctcataacgcagatttctgagagctaagaatatctaagatgcctgcaaatgcacatgaaatgaattatttttctacgctgtatgttggcagtgggaagtataaatggatgattgggggagaaaatgaaaaaatgtgattttattcaaaaaagtgcttgcattttatattttgctgtgataatatataagccgaacgcgtgagtatattgtatttgtgcgctcaaaaaactgcagattttaatgaatttacggaaggaggatttccagtgaaagtaagatcatctgtaaagccgatctgcgaaaaatgcaagatcattaaaagaaaaggatctatcagagtaatctgtgagaatccaaaacacaaacagcgtcagggttgattgacggtttaaagtttgtgtaacgtgcggctgcagtgtgagacgcccggaagggttgttcagactgttaagatagttttagcatgtattgcctaataccgagaggcaacgttggcccgttggccgcagtaattcggaaaggctgcttttcgccaattgcagctgggtgttttaccgaggcaccccaattaggaactgagaaataagaaagtgatgtgtccgatacatcccatttcaccttacttgagtgagagaattcgcgagggtaagtgatgtacaggcattaaggactttcaaagtagaagatggaggaaacagtacatggctcgtatagctggtgtagacttaccaagagaaaaacgtattgaaatcggtcttacctacatttatggtattggtagaccaagcgcagacaaaatccttgcaaaggcagaagttaatcctgacacacgtgtcagagatctgactgatgacgaagtaaagagactcagcgcagttattgatgaaacaatgacagtagaaggtgaccttcgtagagaaatcgccctcaacattaagagactgcaggaaattggatgctacagaggtatccgtcatcgtaaaggacttccggttcgtggtcagaagactaagaccaacgccagaacacgtaaaggtcctaagagaacagtagctaataagaagaaataaataaagctttaaacatctgataagcgtaagctgatcttatgaggaagcttgcatggacacttgatgaatgacgagcgaagcgaggaaatgaatttagtggacatggtgtttcttgtaacatatatttgattgataaataggaaagtgtaggttagttttaaaatggctaaagtgactaaaaaagcgactgcaaaacgtcgtgtcaagaaaaacgttgaacacggacaggcacatattcagtcttctttcaacaatacaattgttactctgactgacaatgaaggaaacgctctttcatgggcaagtgctggtggtcttggatttagaggttcaagaaaatctactccttatgcagcacagatggcagctgagactgcaacaaaagctgcacttattcatggtttgaaaactgtagatgttatggtaaaaggaccaggttctggacgtgaagctgcaatccgtgcccttcaggcttgcggactggaagtaacaagcatccgcgacgtaactccggtaccacacaacggttgccgcccaccaaaacgcagaagagtctaattgatttagaatattaggaggtatttgagaaatggcagtaaatagagtgcctgttctgaaaagatgcagatcccttggcctggatccaatttatttaggaattgataaaaaatccacaagacagttaaaacgtgcaaatcgtaaaatgtctgagtatggtttacagttaagagaaaaacagaaagcaaaattcatctacggagttctggaaaaacctttccacaactactacgacaaagctgacagaatgcctggacagactggtgcaaaccttatgatccttcttgagagcagacttgacaatgtagtattccgtatgggatttgcaagaacaagaaaagaagctcgtcagattgttgaccacaagcatgtagttgtaaacggaaaatgtgtaaacattccttcctaccttgtaaaagccggtgatcagattgagatcagagaaaaatccaaaggttctgaaagatacaaaggtatccttgaagtaactggcggacgtcttgttccggaatggatcgatgtagatcaggagaacttaaaaggaactgtaaaagaacttcctaacagagaagcaattgatgttcctgtaaacgagatgcttatcgtcgagttgtactccaaataatccataggattatatcatagaaaattacctggtaatatttctattatttatacgattcagtggttgattattatcttccgctgaattgtagtatttgaatgaatacccctcaaacttttattaacccagaaggagggaaccctatagtgtttgattttaataaacctaagatcgagattaccgaattatctgaagataaaaaatttggcagattcgtagttgagcctctggaaagaggatatggaactacacttggaaattctttaagaagaattatgctgtcttccctgccgggtgcagctgtaagccaggttaaaattgatggtgtgcttcacgaattcagctccattccgggcgtaaaagaagacgtgagcgatattatcatgaatctgaagagccttgctattaagaaccacagcacagacaatgagccgaaaaccgcatacatcgaatgtgaaggaaaaggtgttgtaactgcagctgatatccaggctgatcaggatatcgagatcatgaatccggatcaggtgattgctactttaaacggtggcaaggactgcagacttgctatggagcttactattacaaaaggccgcggatatatcagtgctgataaaggtaaatctgatgatatgccgatcggtgtacttgcagttgatgctatctatacaccggtagacagagtcaacatgactgtagagaatacacgtgttggtcaggtaaccgattatgataagctgacactggatgtgtatacaaacggtacacttgatccggatgaggcggtaagccttgcagcaaaagtattaagcgagcacttgagccttttcattgacctttccgagaatgcaaagaccgctgaggttatgatcgagaaagaagacaatgagaaagaaaaagtcctggaaatgagcattgatgaacttgagttatctgttcgttcctataactgcttgaagagagccggaattaatacagttgaagaattatgtaacaagacttctgatgatatgatgaaggttcgtaaccttggacgtaaatcattagaagaagttcttgcgaaactgaaagagctgggcttacagcttcagcctgcagaagagtaagaattgatcaggttattggttctctaagggaacaataaccagttaacaaagagatattatacggtggggatgcctaagcagtcggacagtaagaccgaacaagcgtgcccggctgtcccacagatggaggaaaattaaatggcaaaatatagaaaattaagcagaacttctgaccagagaaaagcattactgagaagccaggtaacaagccttttatatcatggaaaaattgttactacagaagctaaagcaaaagaaatccgtaaaatcgcagaaggccttgtagctatggctgttcgtgaaaaagataacttcgaaactgttactgtaactgctaaagttgctcgtaaagatgctgaaggcaagagagtaaaagaagttgttgacggaaagaagaaaactgtatacgatgaagtacagaaagagatcaagaaagatgctccttccagacttcacgctcgtcgtcagatgatgaaagttttctacccggttaaagaagtacctgcaaagggtgccggaagaaagaaaaacactaaagacgtagatatggttgctaagatgttcgatgagatcgctccaaaatacgctgaccgtaacggtggttacacaagaatcgttaagatcggaccgcgtaaaggcgatgctgcaatggaagtactgatcgaattagtataatccagccagattttcgattttatatttgtccagacgatgataagactgcatatgtatggtgttcatgccgtatatatgcagtttttttgttatgctataggaaatcacttccttgtaacataaccgtttattacccttgattatttgagccagatagcgtaaaatcgtagagtatataaaaaccatattgatgaagaagtgttaaataagacattggactgttacaaaatacgagagcaaaagataagcgaggaatacaaatgaccggcaggagattgaaaaattgaggcagaatacgaaaaagaaacgatcaggatttggttatttcatcaggatgtttttgttgttggtggaattactggctgttacactgtttctgtggggaaatgatgcttattccatatctgccaccacacctgaatttaagtgggaaaattataaaacgatcgcacatgcactgggagggattggtgataaaacctatctgaattcaaaagagagttttctggcaggctatcagatggggtgcaggttgtttgaagttgatcttgtgaagacatctgacaatgtatgggtgtgccgccatagctggtatcagtctcttggacaatgggaaggcgatgaaaagaaagttctgtcctcagaggaattcttatcccggcccatttatggaaaatatactcctataacatttgaagatctgctggttctgctgagcgattatccggacgcttttgtgatgctggattccaaacagtattctctccgtaattatcagaaaacagtggaagattatgcagactatattgaactggcagaggctgccggtgtcccggatgtgatgcggcaggtcataccggaaatttataaccaggcaatgtttgccggaacagcactgctgtacgattttccaggatatatttattctttatggcaggaatactctattaaagaactgactgaaattgcggcattttgcagagaaaagaatattcaggcagctacagtctattataaatactggtcagaggatgtgcaggagatttttgacaaaaaagggatcaggttatatatttatactgtgaatgacctgaaggaagcacaatattatatgcaagagggtgcggcaggtgtatgctcagactatctgcaggatactatgtttaactgagttgttctgccggcattatgaaatgatcatagaggattattatagctatagctgttccggaatgaataagggtaaagatatcaggagaaaaagaattttaacaggatatagcaagaattctctctcctctataggtggtagatgaattgcaaataagaaaatgaacggcagtggcgggcggagagaaatcggtatctcccactgacatgaggcaaaccacagtcagtatgttgttgacacgtcagactctgtgaaattaccgactgtgagttgaaacaaataagcggcaataacaaagattatatttataaaggaaattatcatacacaatgaaaataagagtaatgattgctgtctgtgcagcaaaatttgtaggatacgtatgtaagaaaatgggaagacagggtgtgacctgggcaggaaaagtggcgattaagatctgtccggacattctggaacagctttcctcacaggtacgaaaggctatttttgcaacctgcggtacaaatggaaagacaactaccaacaatatgctctgtgcggcactggaagcggaaggacagaaagtaatctgtaaccatacaggttccaatatgctcaatggagttgttgccgcatttgtgctggcttcgaaatggaatggtaagattgatgcggactatgcatgcattgaggccgatgaagcatccaccagacatatttttccgagaatcaaaccggactatatgcttctgacaaatcttttccgcgaccagcttgacagatacggagagattgatatcactatgaacattctggaagaaatgatgcgcaaggttccgaagatgcagattattgtaaacggtgatgatgcattatccgcatatcttgctatggattccgggaatccatatgtaacttatggtatcagtaaaccggtgatcaaatctgcggcaaatgaaatcagggaaggacgtttctgtaagcgatgcggtgaaaaactggaatatcgtttctatcattacagccagctgggagattattattgtccaaaatgcggatttgcaagaccgaagccggattttgatgcggaggatgtaaaggtaggcgaccagctcagcttttgtgtagaaggaaaacacattgtagcaaattataagggattttataatgtgtataatatactggcagcttatgcgggagtgaggactgcgggatttgcgggagagcatttcggggatatgctccgcagatttaatccggaaaacggacgtatggagcagtttcgcattaagggaacaggagtaaccttaaatcttgccaagaatccggcgggatttaatcagaatatttccgcagtgatgcaggaccaggcaccgaaggacatcattattgcgatcaatgataatgctcaggatggaacagatatttcctggctctgggatgttgactttgatcttctcggaaatgattcagtgaaatctattacagtaagcggtatccgctgtcaggacatgcgtctgcggctgaaatatgtggatatcccgtctgtcctcgagggcgatgttgagaaagcaatccgcgacagagtagaggacggagtggggaatttgtatgtgctggtaaactatacagcattattcagtaccagaaatattctgaagagactggagggcgagaaataatgaaaattacaataggacatttatatccggatcttctgaatctttacggtgacagaggtaatatccagtgtctgatgaggagatgccagtggcgtgggattgaggctgagaccataccgtttgagctggatgataaaatagatttctcgaagcttgatatcgtacttctgggtggcggttcggacagagaacagatgatcgtatgtgagaagctacagaaaatccaaccggattttaaggcttatgtggaagataacggcgttgtcattgcaatctgcggtggctatcagttacttgggaagtattacaaaacagatcagggaaacatgaaaggactggacctggtagacttgtatacagagcagggcgaaggccgtctgatccagaatatcgttctgcagagtgagctgtttgatatgccgatcgttggatttgagaatcatggaggaagaacctgcattaataataacaaaccactgggaaaagtactttacggtgcaggaaatgacggtaagtcaggctatgaaggcgtagtatataagaatgtgatagggacttatctgcatggaccgttacttccgaagaatccgcagcttgcagactggctcattcaacatgcgctggaaagaaagtatggaaaagaaacagaacttacaccgttagatgacagtcaggaaaaagaagcaaatgactatatataccacagatttgtaagaggataattatggcgaaatcatgtaatcaaaaaggaaaaatactgtatctgcagaaaatgctgtctgagacaaccagccaaaagcctgtcaccatgcaggagattctggcaaaactggaagaacaggggattcgagctgagcgaaagagtatttatgatgatatggaaaccctgcgtgattttggaatggatatacattacagaagaggacgggaaggcggatattatgaggaaaaatccgcttcagataaaacagaagcggataatacgataatacatcagccggatggcgaaacaggagagaaatctgaaaatgtgcaggaacagattggaaaagaatctgaagcacctgcaaagatcagtgctccgacaccctcccaaacaggagagaatataaaagaaatcaggcttgtatgtcagaattctacaaagaaaaaaatccagcgtacctttggttcggagattttctgcaaaataaagggggaggataattttattgtaactgttgaggttgtggttgataaggcattttttggatggttgacttctatgggaagaaatgtacatattctgaaaccaaagaaagcagccgttgcctatcgggattatctgaagaacattgcaaaagattataagggaattgataaataaatatgatatcagaaaggatcgtattatgaaaagaagagcaacagctattctgcttggaataatggtatcctccatgttcctgtctgcctgcgggaagaatgaggcaaaagaagcagcaaatgaaagcgcccaggtagaagaagagggcgtaggcgaagtaactgaggaaggtgaaaaagtagaggcagaaaataaaaatgcttctgatgccgatgacagcagcaaggcaggagacagtgcaaaatcagacgaagacaataaagagacatcagtgaaggagaaagaagacggagattcttcaggaaaagattcagatgatgaatcagaggaagatgctgaggtaacggaagcttctgccggaaagataggtgtgcttctttctgatgacgatgaggatgcaaaaattgacagcgaagagatgacttcgcagattgaagatggaggatatgaggcagatgtgaagaatgccggcggcgatcctgcgcttcagatttcccagattcaggaatttattgatgagaaggtttctgccctgatcattgatccggtagattcctatggtctgacagatatcctgaaaactgccaaagagcaggaaataccggttatttcctatgacagtctgattcgggatactgcggatatcaattattatgtaacttatgataccagagcaataggaaaggatattgccaaagaaattatcaaaaaaatggatctggataaagccagagaggataagaagtcttatacaatagaatttctcatgggatctccggatgacaatgctgcactgtttctgtgtaatggaattcaggagggacttcaggaatatctggatgatggaacacttgtatgtaaatccggaaatacgtcatttgatgatacaggaatcatgagatggagcgagacatctgcaaagacaaaacttgattcgattataagtgagttttatgcagaggagaaggctccggatattatctgtactgcatatgacggatttgcttatgctgcagaggaaattttaagtgacagtggtctggaaccgggaagtgatgaatggccgatgatcacaggatatggcagtgaggcacaggcagtaaaggatattgcagcaggtaaaatgtcatttaccatgtttatggaccgtaaggaactggctaagggcggagcacagatggccattgactatctgacaggagagaaagttgacgtaaaagattattcacagtatgataacggagtaaagattgtgggaacttttacatgtggagcacagatgatcgacaaggataattatcagattcttgtggataacggaacttatacggaagatgagatcgctcctgatcccacaccgacaccggaggtgacacctgcgccagaggcaacacctgtgccgaaagtgacattaaagacagcctcagaggaagattcaaaagaagtgacaccaactcccgaaacagaagataaatcagaaggtgaaacgagagaaaatctgatctatgattccgaagataactcaaaagtggagaaaacatcggatcagaaaaaataaagaattcatagaacaaaaaaggatgggttttcccatccttttatagttaatctctgaaggttaaggaatcgtctgtcatggaatcaacgatagcaagagattcaagacgtattcccatatcgcggatctcctgaccgccatgctggaatcctttctcaataacaataccggctccttcaagagttgcccctgatttcttaacaatatcgatcaggccgagaagtgcacatccgttagcaaggaaatcatcaatcagaagtacatgatcttcaggtccgagaaacttcctggaaaggatcacatcatatactttcttatgagtgaaagattctactttagttgtatacatttctccatccagattcacgctctgtgctttcttggcaaaaactacaggtacatcaaagtactgtgcagcaatacaggcgataccgataccggatgcttcaattgtaaggattttagtgattggacagtcggagaagcggcgtttgaattctttgccgatttcattgatgagggtaatatccatctgatgatttaagaaactgtctacttttaaaatatttcccggttttacaactccatccttaagaattcggtcttttaaaagcttcatagatttctctcctttatatatgtaattagtttgtagctgtcggtaactatccggtacactgcttcccgaaagtactgaatagttacagttactgtgaatatgcagaattcaaaaaaacatcaggctgcaaaatgaacagtaacattgctgttttgataattatagactatgatacgctataattcgtcttcatgcaattatttttgacaaaaaatctaaaaataattataatagtctcagactggttgggaaaaaccgcaggacaatctgtgcagattgccgtaaatcagccgaagagggctaaatagtgaaacggattgtgaatatccgtcttacggactggagatggaatatgaaagaatatgaactgatatgggaaatttttaataaatgtccgcggaatcagatgcgtgatgtttttgtggaagagctggaacttgaggatccggaagaatatatcagaaataaattcaaaggaaaagaagtttcctatgaaaaaactgtcctggaggatggaaccattatttttgatattacgacttcacaaataaaacagcgttgctcctttacagaaatttgacaaatgtggtataatatcatttacgctgtacaaaagtgctgtaagcaggaaagccacagacagtgtgtgaggatataaagacagataagcgataaagaatcggatattctgaaagagaaaggggaatgttatggccgaggaacaaaagacacatacgcatgtactggaggatgggacggtagttgaacattctcatggggagcatgggcatcatcacagtcatgcgcatacaaaggcagtgctgaatcgtatgtccagagcaatcggacatatggaatctatcaaacgtatgatagaggacggaagagactgtgcggaagttctgatacagctttcagcagtgaaatctgctatcaataatacaggtaagatcattctgcaggatcatatcgaacactgtatcgtagatgcagtggaacatggtgataaagaggcaattaaagaacttgaggtagcaattgacagatttgtaaagtaatatgcgtactccacactggcaatagagaatattttgttattgttcacacaccactatcccgcgaggtgttttggcatgaatatgccaaaatcccgagacatacaagccaaaattccattgccgtaggcaatctggaatgaattttggctacgttactgtgaacggagtgaatagtaacaatattttgtcagtacagcagtgcgtaaatataaaggagaagattaattatggcaaaagaatgtaacaacacttcatgcgacaaagcaagctgcgaaggttgttcaagcagcaagaaacagcagagctttcaggcagaaatgaatgctcagtcaaatgtaaaacatgtgatcggggttgtcagcggaaagggtggagttggtaaatccttcgtaacaggctctctggcaaacatgatggcagcacagggatacaaagtcggtatcctggatgcggatatcacaggaccgtccattccgaaaatgtatggattaaagggtgcagcaatggcaaatgatgaaggtatctatccgatgatcacaaaaaacgggatcaaggtaatgtccatcaaccttctgcttcctacagaggatactcctgtaatctggagaggtccggttcttgcaaatatggtaaaacagttctggacagatgttatctggggcgacgtagactatctgtttgtggatatgcctcctggaacaggtgatgttccgcttacagcattccagtctctgccgatcgaaggaatcgtgatcgtaacatcacctcaggatctggttaagatgatcgttaagaaagcctttaatatggctgagatgatgaagataccggtacttggaatcgtagagaactacagctatgtgaaatgtccggactgcggaaaagagatcaaagtctttggtgagagccatattgatgagatcgcagcagagctgaaggttcctgtacttggaaaaatgccgatcgatatggattatgcagccaaggcagacggcggattctttgcagcaatcgacaatcagtatattactgatgcgctggctgtaatgccgaaataagaaaaagaagttctcattcagtaagaaacgcgattataaaaattgttgtttcagtactgagtgaggacttcttttattatatggaagtaaacatttcaataaagcgttcagcagcctgagagacagtaagactgtcatgctgggcaagtataagctgacgtccgggaagaggctcttttaacatgagcggtgtcagctgatcattttcttttaacatataatcaggaacgcaggcaattcccagtccgatccgtgccaggtccagaagcaggtcattactgtttaactctacttcaggaagaagcttgagattatgggctgtaaatgcctctcgcagatattcgctggtggtacttttgggggaaagcatcaggatcggatagttcagaagctcctgcagttcagtctgaacagtgtgtacaggaaagtaatccgtattggcaacgaatacatcgtggaattcttttagcacacgtgtctgaaaatgactgccaagtctggaattaggacagttgcatacaatcagatctgcctgacctttctccagaagctctgcacagccgatggaggtactgtttgtgactttgatacggacatccggataggtttgatggaatttctgaagataatcaatgagaaaataccggcagatcgtatcgctggcagcaatacgcagctggcctttcagcagattgtctcctgacaggagagattctccctcgtccagaagttggagagccggttttacatgctggagcagaagttctccttcaggagttaacaatacttttttggtactgcggataaaaagaggatgatttagcttcttttccagagttttaatggactggctgactgctgactgggagataaaaagctggcgggaggcctctgagaagctgagggtggtggcaacatagtagaatactttgtatagttcaagattaatatccatagaaataaatcctttcataaaataatgtgatgatacaaattgtcggcagcaatggaactttagattgtatgtctcgggattttggcatattcattccaaaacatttcacggatagtgattgattagtgttactgttcactccgttctcagtaacacgcttcgcgatgcacagaatttatgctaatcgcataaattcgcgcggtatatctcgggttttctgtgaccttcgctcacaaaaaacacctcgcgggatattaccagtgaacagtaactaattagttacattaataaaaaatataagatatattaattttactaatgatatttcctatgatactataaagaaagcaatagttcaagcagcaggttcactggagtcgggctgcaaggtgcttttaaagcatttttaaaacaatgcatacataagaaaggagtttctatgagtaacgtaagacgtgtctatgtagaaaagaaaccggccttcgctgtacaggcaaaggaattaaaacatgaagtcagcagctatctgggaattaaatccgtaacagcagtacgtgtgctgatccgctatgatgtagaaaatatttctgatgaagtttttgataaagcatgcaaaactgtttttgcagagccacctgtagatgatttatatctggagaattttgaggcagcagaaggctcccgcatcttctctgtagaatttttaccgggacagtttgaccagagagcagattctgctgttcagtgtgtacagttcctggatgagaatgcacagcctatcattcgttccgcaactacttatgtaattgaaggaactattacagatgaagaatttgatgctatcaagcatcactgcatcaaccctgtagattcccgtgagacaggtctgcagaaaccggaaacactggtaactgttttcccggaaccggaagatgttaagatttttgacggatttaaggaaatgccggaagcagaattaaaggaactttatgattctttaaatcttgccatgacattcaaggatttccagcatatccagcattatttcaaagaagaagagaaacgtgacccgtccatgacagaaatccgtgtacttgatacatactggtctgatcattgccgtcacacaaccttctccacagaactgacagatgtaaaatttgacgaaggtgattacaaagcaccgatcgtagatacctacaacaaatatcttgctgacagagaagaactttacaaaggccgtaaggacaaatttgtctgcctgatggatctggctctgatggctatgaagaaactgaaagcagaaggaaagcttgctgatcaggaagaatctgatgagatcaatgcctgcagtattgtagttcctgtagacgtagacggtaaagaagaggaatggctgatcaacttcaagaatgagacacataaccatcctactgagatcgagccattcggtggtgcagctacctgccttggcggtgcaatccgtgacccgctttcaggacgtacttatgtatatcaggcaatgcgtgtaacaggtgcagcagatcctactgtttctgtaaaagaaactctcaagggtaaacttccgcagaagaaactggtaagaagcgcagctcatggctacagctcctatggaaaccagatcggtcttgcaacaggctatgtaaaagaagtttatcatccaaattatgtggcaaaacgtatggaaatcggtgctgttatgggtgctgctcccagacgtgcggttatccgtgagaattctgatccgggagatatcattatcttacttggaggacgtacaggacgtgacggtatcggtggtgctaccggttcttccaaggttcatacagaggcttccatcgaagtgtgcggtgctgaggttcagaagggtaatgcacctactgagcgtaagatccagcgtatgttccgccgtgaagaagtcagccatattatcaagaaatgtaatgactttggtgcaggcggtgtttccgttgctatcggtgagctggcagcaggtcttagagtagaccttgacaaggttccgaagaaatatgcaggtcttgacggaactgagattgcaatttccgaatctcaggaacgtatggctgtagtagttgacccgaaagatgtagatactttccttggctatgcaaatgaagagaacctggaggcaattcctgttgcagttgtaacagaggatcctcgtctggtacttgtatggagaggaaaagaaattgtaaatatttcccgtgcattcctggataccaacggtgcacatcaggaaacaactgtagaagtagaaatcccgaacaaagaaggcaatctctttgaagagcgcccggatgtagctgatgtaaaagctaaatggatggaaactctggcagacttaaatgtatgctctcagaaaggacttgtggaaatgttcgacggttctatcggagcaggcagcgtatttatgccatacggtggtaaatatcagcttacagagactcagtccatggtagcaaaggttccggtacagaatggtaaaacagatactgtaactatgatgagctatggctttgatccgtatttatcctcctggagcccatatcacggagctgcttatgcagtgacagagtccgttgcaagaatcgtggctacaggtggtgactataagaaaatccgtttcacattccaggaatacttccgccgtatgacagaagatcctaagagatggagccagcctttcgcagcacttctcggtgcttatgcagcacagatgggatttggacttccatctatcggtggtaaggacagtatgtccggtacattcaatgatattgatgtacctccgacactggtatctttcgcagttgacgttgcgaagatccaggatgtgatcacaccggaattaaagaaagcaggaaacaaactggtatggctccgtgcaccgaaggatcagtatgatctgccggattatgcaggaatcatggatcagtatgaaaaacttcacaaagatatgcaggacggcaaagttgtttctgcttatgcacttgaccgccatggtattgcagcagcagttgcaaagatggcatttggtaatggcatgggtgtaaagattgagcataaccttgatccgagagatttctttgcacctggatttggcgatattatcctggaagtttcggatggtaaggttggtgagctttccatcacttatacagtgatcggtgaagtaactgctgacggtaacttctcctatggaaatacagtgatcactgtagacgaagctgaaaatgcatggaaaggtactctggaaaaagtatttaagacagtttcttctgagaatgataaagaggcagctgacagagatgagaagctttatcgtgcagacagcatttatgtatgcaagaacaaagttgcaaaacctcgcgtgtttattcctgtattccctggaacaaactgcgagtatgacagtacacgtgcatttgagcgtgcaggtgcagaggtggatgtaaaagtattcaagaacctgactgctgaagatatccatgactctgtagagctttttgagaaagcaatcgatcaggcacagatcatcatgttcccgggcggattctccgcaggtgacgaaccggatggttctgcgaaattctttgcaactgcattccagaatgcgaagatcaaagaagctgttatgaagctgatcaatgagagagacggtctggcacttggtatctgtaacggattccaggctctgatcaagcttggtcttgtaccttacggtgaaatctgcggacagaaagcagattctcctacactgacatttaatactatcggacgccatatttccaagatggtttatacgaaggttgttagtaataaatctccttggctgcagaaggcacagcttggcggtgtatactgtaacccggcttcacatggtgaaggacgtttcgttgcaaatgaagaatggctgcagaagctgtttgcaaacggacaggttgcaactcagtatgtaactccggatggacagctcagtgttgatgaggaatggaatgtcaatggttcttatatgaacattgaaggtattaccagcccggatggacgtatccttggtaagatggcacatagcgaacgtcgcggggacggagttgctattaatatctatggagagcaggatattaagatctttgagtctggtgtggaatattttagataaaatatttttccagacggaaggttcccagaggaaggacagaaagcgctgtccctcctctggactccacccttgcgcttcttttaagggcagcgccgggattgtggtgtggaggagtgtattaactttgcgtattcgcctggttgggcagcgcccttttttgatgatgaaaataataaaaactattgcaatttcgtggctttttgaatatactatatgtaacagagttgcccgaagcctttttggcattggggaccaagctgagacttgtgctcagcttttttacgttaaggagtgattttatggatttgaaaaagccattgacttttgatgagcaattggataagttagctgcccatgggatgattatcagagacagagaaaaagcaaaagatattttgaatttgtgacataaacatatttgcagcagtcaaaagaagaagcaacatgtttgaaagaaaaattaagtcaaaaatgccgcagcctttgaaaatattggctgcggcatttaaaatatatgatatgtttgatgtaaaaaacatcaggttctcaaccagacatttgggtaagtcaagacgatgcttctgatataagatatgcaacattaaaatcatcatatacttgagaatttaaatgcatatcttcatataacttgatatagtcgccgattgttttgccaaaaacagaactattacaattattgcatgtgttatcctctgcatatatatgagtgtttccatcgttgtcctcaacaaataagagagtaacatctattttatcttctgttaaccagaaagagatatattttgaaagagtcccatcaatttctgtggcaccatccggaatttgctcatctgattccagctcattaatatgttcccaaaaaatttgaggagagaacacaagtaattttaagtttttttgagagtcttctgagtaccatatatgtgcttctgtgttgagatagtcggttatattaatatccgtatctgccggtaactcataagtttcaccgacgtcggaagtcagtgaaaaggtttttgtatgattagaataagaagtgacaatccccttgacaaaatagtaagttgtatctgactcactgtcataataagagccggaaccatctatatcataagatacatgttgcccctcaggctccttaggggcggaaagggtgattagatctgagggggctttgccaaaagcttgtccggatagcaatatactaccgagtacgatactgcctgcgatacatagaatttttacattattcatggttaaatggcctccttgtttagttgttgaatattatatcaattaaagtgtgaaaattgtaattttgacttatcgaaatatgttttagaaatgagtaggatttcggttatttttgaatatgataaagaataaagacacaagtattgttcggtttattagtcgtgttccaatggttactggaaaataattgatgattacaaatacaacgtaatattatcaatagcaaagctataggatttcaaaaatgaagtcttatagctatttttgtgtagcagtaaaaattgtgaagggtatgtttgggaaaaatatttttgattacttgatttgaatcaagcggtgaaattgctatttgtcagacaataagatataattagagaaaatcttgtttgcaaaagaacaggataaacagtaactttaagcaagatggttttgtctggtgattttgagagtgtaaaaaggaaaaagtatgagtgatgaaagaaaaagggaaaatgaagaggaaaaactgaaagatttttttcataatgtgataggaataaaatcggaagctgtgctggaggtgttggcggagaactcggaaatctgtaagttgaaagcaaaaactttgctgatgaaagagaacgagaaggtaaagctttggtagggatcatgaatttggacaagcagataacctctttcctgacagtggagttgataacggattgtgaaattgtaaggatatcagcggatgttcttcgaaagctggctatggagaatatagaaattgctctggtctgtaatcgaatgcagagtgtggcatctatgagggaatatgaatacagaaaaatgattcttacctgtaatccggtacagagatatgaatatttcctggaaacctatccggggctggaaaaatatgatggggcttgacagagctggaaagtaacctgggccaagacaaaaggtgcatctggttatgaagtatacaaactgactggaaagacatggaaaaaagtcagtgacacaagatccacttcttttacagataagggattaaaaaagaatactacttatcagtataaaatccgcgcatatcagacagtgaaaggaaagaaagtttacagtgcgttctcatctgtgaaaaaaattaaaagataaggagctaagaggaagaaaaagttctcagcgattttgacaggtgttttttgatactgttttgtatggtaatgtcagtaactgtaaatgctgcgcaaaaaatacctggaagagtaaaaatggtaagtgcgtattctggatccggattgcgaatatccgcttgactcaggttcatgttacatgggacaaaacgacaaattattctcagatggattatccaagtcaaaatgaatatagcagaggatgacctgtaatggatgcaaaagtgcaaatcccaaagaaccggatgtggatgatggaatttaatgaatattacgttttcaaagcagtaggatgaaaggaatatgacctttctcctgctgtttttctttctgaataaatccaggagatatagaatttgatgtggtaaagcgataaaaatatagttttaaactataactggtgctagatattatgaattggcatatttggaagtgtagtggtatagtatgttcatgctcaacggagcggggaataagagagagggagaatgagatgtctgggattgtgattgagaaggtccggaagtcttttgacacgaaagatggcgtggtcgaggctttgaaggatgtgaacctgaatatcgattccggtgatatatatgggattatcggtatgtcgggggcaggtaagagtacattggtacgatgtatgaattttctggaggttcctacagagggacaggttctgatagatgggaaggctcttggagatttgacagagaaggaattgagaaaacagagggaagagattggtatgatcttccagcatttcaatctgctgatgcagaagtcagtgatcgataatgtctgttttcccctttatataaaaggaaagaagaaggcagaggccagaaagagggcagcagagcttttggagatcgttggtctgggggacagacagaatgcttatcctgcacagctttccggtggtcagaagcagagggttgccattgcaagagcacttgcatcggatccgaaaatcttactttgtgatgaggctaccagtgcactggatccgcagactacttcttccattctggaattgctgaaaaagattaacagacagtttggaatcaccatagtgatcattactcatcagatgtcggttgtgcgtgaaatctgtacacatgtggcgatcatgtatgagggtgaagtggttgagaagggactggttgcagatatttttgcaaatcctcagtcagaggttgccaaagaactgatccgaaaggatacaggctccgatatcggcgcagacagcagaccggatgcctgcagagaaaagggacaggcagagattaaaagcggtgagaagatacgaatcgtattctccgagaactcagcttttgagcctgtgatcgcaaatctgatccttaccttcggagagccggtaaatatcctgaaggcagataccaagaatgtaggtggtgtagccaagggagagatgatactggagtttatggagggcagtaccaggacagaaatgatgaaacagtatctgaaagaaaaaggtttagcaatcggggaggtgacagaatatgtgggatcatgagacaataatgatgatcgtccagggtgtgggagaaacactttacatgacagttctttccacagttctgggatacctgttcggacttccaatgggagtgctgctggcagtgtctgataaagagggactgaaaccaaatgcagtgttgtataagatactggatgccatcgcaaatattgtgagaagtattccgtttctgatcttactgatcctgttgattccttttaccagagcagtggtgggaaagagttatggatctacagcaacggtagtgccactggtagtggcagccattccttttatcgcacgaatggtggaatcttctattaaagaggtggatgcaggtgtgatcgaggcagccagagctatgggtgctagtaatataagaatcatcgtgaaggttcttctggtagaagcaagaacttcactgatcacaggagcgactattgcgattggaacgattcttggctattcggccatgtccggtgcagtaggaggaggcggacttggtgatatcgccatccgctatggatattacagatatcagtcagatatcatgatcgtcacagttatcctgctggtggtgctggtacagattttccagtcagtgggaatgatgatcgcaaataagattgacagaagaaagtagttttaagaaatcgttgattataaaatggttatgaaaaaagttaaaatataaaattcaggaggacaattattatgaaaaaattagtggcagcagttttaacaggagtattagtagcaggaactttaagcacaggagtttacgcaaaggatgatgacaagacaatcacagttgcagcgtctgcaacaccccacgcagaaatccttgaagaagcaaagccaattcttgagaaagaaggatatgaccttgaagttaccgtatttgatgactatgtaagaccaaacgaggtagttgagagcggagaattcgatgcgaactacttccagcatatcccatatctggatcagtttaatgaagagaaaggtacacaccttgtaaatgcaggtggtattcattatgagccattcggaatttatccgggaacaaaagacagcctggatgacctggaagatggagattctatcgcagtaccaaatgatacaacaaatgaagcaagagcacttcttcttctccaggacaacggaatcatcacactgaaagatggcgccggattaaatgcaacagttaaggatatcgaagagaatcctcataatgtagaaatcgtagaactggaagctgcacaggttgcacgtgtaacaggcgagacagcttacgtagtattaaacggaaactatgctctggaagcaggcttctcagttggaaaagatgcacttgcatatgagaaatctgattctgaagcagcaaagacatatgtaaacgtaatcgcagtaaaagaaggcaatgaagacagcgaaaagattcaggcacttgtagatgtactgaaatctgatgagattaaagattttatcaatgagaaatatgatggtgcagtaattccttttgaagaaagctcagatgcagaagaagcagatacagaagatgtagatgatgcagacagcaaagatgcagaaaatgcagatacagctgacacagcagaagacgctgaataagtaaagataacaggagattcctttttcaggtaaaactgggaagggaatcttttttgtgcaaaaacatataggatttccatgagttttctgatacaatctatagtaattctataaaaaacgacagacaatccgatttatcgggaaactgatataaaattatcatggcgatgcgaaaaaatgtgaccaatttttgattgtcggcggtcggttataccaaagcaggagagattgtatgaaagagaacaagatatggaacgattatttgccagaagacatgcaagaacactggactgtatatgaatgtctgaaggaaagtgaagattcatccactttcctggtgaaagagacagttaccggaatcctgtgcgtgcttaaatgggggcgtaacaggcaggcagagtttctgcgcaatgaaatggaaatcatggaaaaaatggcggacaggaaattgtccgggattccaaagacatacaggatatttgaagaaaatggcgaagtgtatctggtaagggaatatatagagggaatgtctctggctcagatggttttgcaaaaaggtggcatatcagaagcggaaatctgcaggatcagcaggaagatatgccagacagcagagcagtttcagaatccggatgagcctatgatacaccgggatataaaaccggagaatatagtggtcacacctggtggtgaggtggtattcattgatttcggtactatgcgcagttataaaaaagatgggtcgcgtgatacttttgtggtgggtaccagaggaactgcggcgccagagcagtatggctatacacagacagaccagcgtacagatgtgtatgcaatcgggcagacaatgctgtatatggtttcagagagctatgaaaagaatcagctttctgagtgtgcagtgagccggagaatgaaaaagataatagagaaggcctgctcttttgagcctgataaaagatatggagatgctgcgcaattaaggagagcagttgagaaatgtcaggcgaacaatagaaaaaaggtttataaaaaagcaggcgcagtctttggactgattgcagcaggttatatactggcaattttttccccggatggcacagtgattgaaaacaaaaggattgaaacggcagaacagagtgcggcagaagaacagatacaggcagagataaccttcagagaagaactgatagaagaagccgtgcgcaaggaactggggctttcaaagacagacaaaataactgcctctatgctggaggatgtaaggaaactccgcattgtcggaaaagaaattcttgatgatgaggacacattctggggtgaaggccaccatgtggatggaaaggacagcagcttcggatctgtgcgcggaaatattacagatctttcggatctggcacaaatggtaaatctggaggaacttgcgctgtgtaaccagaaaatcgaagatatttccgggttaaaagagttgcctttgaaaaaactttatctgagcaagaatatgatcacagatttctctgtgcttttgaatctgatagatctggataccctctgtattatggagaatccggcagagaatctgtcagtgattggagaatgcacaggcattttaagattaaatatacaggggatgaatctgacagatatagactttctgaaaaatctgagcctggattacctggatatgagtaatgtggaagtagaaaacaatatatttgagccattggcagagatgaagaaactggatactctgtgcatgtgtgatgtaaatgaggcggctgccgaaactctttcgcagatgagtaccttaaaggcgctgttcatgtggggggatagtaccatactggagaatctgaaaccattgaaagggatgacacagctggagacacttgcattcacaacacagatttcctcgttggaaggaatcgaacagtttccttcattaaatttcctgtcagtgagtttcagcctggtgaaagatctgtctcctgtcacaggagcaaagaatctgcaggtaatagatatttccaatgcagatattgaaaattttgaaccgctgtttggacattcgggactaacagaggtacactgtacagagggacaaaaagaaaaaatcatgaagatagattcttcccctgattttgaaatttatacataaaaagggacaaaattgtcccgctctaaaatgggcagatatggtacacttaacagtatcatatctgcttttaaattatggatcagtcatcagataacggatagtggtaaagatcaaaaaaaacaacctcgggttttgacagaagggagatatgaacaggaaagaggtgtgagaagaaatgaaagaaacagaagaaatcatgggaatgataaaagaggaaggcgccgcatattttgcaagggaacgaggaaacaaggtagaggtagggctttatcttgagcatataatcgaagaacgtggaatgaaaaagaaagacattgtgcgaaagctgaatctggaagaatcctatgcacgaaaactgtttggcggtcagcgaatccccacaaggaaaatactactgcagtgtgcgtttctcctttctcttgatctgtcggatacacaaaggcttctggatatcggtcagaagccgagactttatccgcgcgtacgttacgatgcagcaattatttatggactggaagagaagatgacactagaagagatgaacagcttcctggatgaaataggggaagagattttactgtaaaatatttttgaaagatatccctgaagggattctgaacgctgtcaaaaatgaagatggcagtgtataaaattacagaggtactaaaaaaatcattctcgcaaattgtgcaagctgcgattacatcttgcagggtgctttttttaatacactcaaatccagaaaaaggagggttttacgtatgaagaaaaaacaagtcgcattattgttggcagcacttatgtgcataacacctatggcagaaagcgcagctgttatgggcgcagaattttcttcgggggaagaaactgtagagatgcagggcacggaggaagaagccgaagcagaggatacggcagaaatctggacatccggggaagaagtatcagattttgatacggacgaagcgccggaagtggacggatttacatcagaagaatcagaggcatcgacagacgcagcaggtgctaaacaggtaaaaggatcttttgaagtggcatatataacagaggaacagtacaataatgccctgcagaatgaagaacgtccggaagtggacatgaaaacagtagaagacactactttttcaaatgcgttaaacagtatcgaaggagaaaatacaggatactgttttgtaagcgtccaggatctggaagatgcagcagactttgtggctcctgaaggaatgacagtactggtagagaatgcaagagtcagaagtattacaccgaacggaaacatcgcattctggggtatggtagatccgccagagacgattgaaatcaaagaaggaaaaggaacgacaactttcttctgtcaggatatgagaagcgtattaaaaggaactggttccgatgataaagtgatcttttgtgggcagaataatgcgataggtggtatttccggagtggaaaatatatatctgagaaataacagccatgatctgcaggtatttggtgccagtgaattttttaatatttacaatgaaacggataatatcaaaaacaatccacaggatgaaaatgctttttttatacacattgtaaacagtaagactgctccggtattccataaaacatttgactggggtactggcgagtttgaaaatgaaaatggagataagtggagcagtccttacggaattggaattatatataatacatcagatgaaaaaaatgaatgggaagatattcctgttccagcaggtacacaggcagtgaaatatgatatgcctgacgaagatattgtggaaatgctttccagaatttgggtctattcagaagatggtacgactcaggacatggatggaagaatctggaatccggatgaagataatgcagttgatcttcaggaattccaggattgtgagggaatgtcagcacaggagattttcgaggcatacggaagggcagaattccctgatggaggatgtgtgtggattaacgtcgcaccgacagcacaggcggaaagatatataaatgcatatcagaagaagaacaatgccagtggctattatctgatgaatatgaaagctaacaccaagatcagtggaacgcttactgttccaagtgctgcgaaagcactgaagatagagggacagaataattatgacgaaagcacagatacagatcattttgttccgacctcaatttcttctgtaaatgttccggcaggaaagaaactgtcactgtccaggattcttgtaaaggcgaatactttaacctttacaggctctggagaagtggaacttatgaatgccagattagatgcaaatgtaacagcagataaaattaagattgcggatgctgtagtgaagagcctgaactgtaaagaactgacatcagaagagggtgtatgtctggttgtatctgaatatctgaattttgagaaagcagtgattaatccggaaataaccatttatggacagccgggaacttatctgaaatttggtgaaattgacagtgcagaatactctcagacagcaattccgcagatttatcttggaacaaacggaaaacagacagcgcagctgtatataggcggagcattgaaacttggttcatatgaaacggagggtgagacatattcaagaaatctgatcgttcgacagtttgatacaaaagaagcgcaggcagcaggcgttcctgtatcgaaagattgttttgatccaacatataggtatgcctgggaggagacagaggataatgactggttttactttacaaaaatatacaagaatgaagaaataaatcttgttacggttaatgctagtctggatgaagaatattctacaaacagacttcgggcgcagtttagatttgatgtaaatggtgagaaaaaatatggagtagtacttcctcgatacagttatctggatgaattcgaaggcttaacaaccggaattgatggaaataaacgccgtttattttatgtagactggtggacaaatgaagagaaaataaaagctgttgagattcctgcatactatgagttctcaggtcaatctctgaacagcatcgcatctgcacagatttctacaatcaagacccaactttatgcaggtaaggcgattaaaccgtcagtaacagtaaccttaaacggcaagaagctgaaagccggaatagattacaccgtttcttatgcaaataacacaaaagccggctccacagcatctgtgattattacaggtaaaggcaattatgttggcacagcgatccagaatttcgaaattgcggcgattccggcaaaaggaaaggtatacacatccggaaacctgaaatacaaggtaactaaatccgcatacaagaatggaacagtaagcgtttatgctccggcagagaaatctcttacaagtgcatctgttcctgcaacagtaaaaattaatggttatacatttaatgtaacagcaattggtgataaagcatttaatggctgcacaaaactgaaaaaagtcacgataggatccaaagtaaccacaattggaaaacaggcgtttaacggatgtaaagcactgacttccattacagttaattctaaagtactcaaaacagtaggagcatctgcattaaagggaatttctgctaaggcagtaatcaaagttccggcagcaaaattaagtgcataccagaaacttttcaagggcaaaggacagaaaaattctgtaaagattacaaaataagaaatagaaacaaagattatatagctaaaaccatacagttaaaattatatagaggcagaatcagtaaaaatttctgctacacataaaaagatagttcctgaagaagaaacccggaattagtgtaccgacaagattgtttcaagaatcaacttgtcggtacattagagttgttgtcatgagcaattctgtttccgggtttcatttacctgtatttctttgaaaaattcaggtgataagatggctttaaaatgtataaacaattagaaaaataaaaaaaattaaaaaagtttcaaaaaaggtgttgacatccgacaaaatccattatataatagcaaagcaagttacggagcggacaacaaataagccgcctgaaacaagcacaatatggaatcttagctcagctgggagagcatctgccttacaagcagagggtcataggttcgagccctataggttccatatcttaaagaaaatggcgagatagctcagttggctagagcacacggttcatacccgtggtgtcgagggttcgaatccccctctcgctacttgacagagaaatctgtcaccaacaaatatggaatcttagctcagctgggagagcatctgccttacaagcagagggtcataggttcgagccctataggttccatatcttaaaagaaaatggcgagatagctcagttggctagagcacacggttcatacccgtggtgtcgagggttcgaatccccctctcgctactacacgaaagatgagtctgtagatcgagtgaaaggtttacaggctttttttatgttgccggcatatttatgcaaaaatatacaaaatttctttttactattgccataatccccaaaatcctttataatgcaaaaaggtgaaagcaaaagttcattgtaatgacagtagtatgaaatgataacagggtagttattcaaaaaaaggataactgccttgtttttgattataggaaaaatcgctattgtaaaaccttttgccgaatcacatcaacattcacgaaagagagggaaaggaatggagaaacaagagaaaaacacagtaacaccctacgaccttgatggaaggccgccactgaagctggcgattcctcttggtttgcagcatgtgctggctatgttcgtaggtaaccttacaccgcttctgatcatcacagcagcctgtggaatcgaagccggcggagaactgcaggtagcacttctgcagaatgccatgctgatcgcaggtattgtaactttggttcaggtatttaccataggacctgtgggtggtaaactccccatcgttatgggaaccagttccggttttattggcgtatgccagagcgttgcaggagtcatgggtaatggagtggttgcgtatggtgcgatcatggcggcatcctttatcggcggtctttttgaaactgtactgggaagcttcctgaaaccactgagaaaattttttccgtcagttgtaacaggaaccgttgtattatcaatcggtctttcactgatcgctgttggtatcagttcttttggaggcggaagttccgctaaggactacggttctctggagaatctgtttgtaggttttgtagttctggttgtaattgtcgtattaaaacatgggacgaaaggatttacaagctttgcatcaattctgatcggtattatcgtaggatatgtgctggtaagtattatggcagcagttcttcctaccacatttacctatgtggatgatgcaggtgcaacagtagaagctaccaaatcctgggttcttaactgggataaagtagcaagcgcatcctggtttgcagtgccgaagattatgcctgtcaaatgggtatttgatgcaagggcaatcgttccgatctgcatcatgtttattgtaacagctgtagagactgtaggtgatatttccggtatcacagagggcggtcttggaagagaagctacagacaaagaactttctggcggcgttatgtgcgatggtcttggatcttcactggcagcagtatttggcgtacttccgaatacttctttcagccagaacgtaggtctggttgcaatgaacaaggttgtaaaccgtttttcaattgcaacaggcggtattttccttatcgcatgtggtctgtttcctaagcttgcagcactgatctccatcatgcctcagagtgtactgggcggtgcggcagttatgatgttctcatctattgttgtcagcggtatccagcttatcacaaaatggccggtaactccgagaaacgtaacaattgtctccgttgcacttggtcttggctatggacttggggcaaactcagcagtccttgcacatatgccgcaggcaatcacattgatcttcggcggttcaggaatcgtacctgcagcactgtttgctatcattctgaatatcgtgcttccaccggatgagaaatccgaagttgagattgcagaagagattcttgacatgaagaaaaaagaggcacagaagaaatagcagcagaatcaacttgttggcacactgggattgttcgaaagtgaataagtaaaacaataaaaagcgcgaaactgggaatatctggttttgcgcttttattcagattatagtgaatgattatctggtgcagatgtatgtggcgaaaacagactgcagatatctgtaatgaatttcctgataatggttactgttcactctgttcacagcaacacgcttcgcaatgcaggaaatatgaacctctttgtgcaaagcccaaggagtatcgtttgctttgcaaacttaatttatgctaatcgcataaattcgcgcggtatgtctcgggttttctgtgaccttcgttcacaaaaaacacctcgcgggatattaccagtgaacagtaactgataatgataaaaatatgttattgaatgaaattcagggttgacaaatatagcttccggtggtaaattaagtgtaaatttaacagattaaaccgatgaagcggaagtcaaagcagtcatgcgcgcacagagaatccgggaaggtgagagccgggtggaaatgcagtctgccaaatgggccgctgagggcacagtgaaaggttgaagattacagagtgagctgagtatcctgtgacgtgaggcatacgtcagttgccggaaatatgaaggtatttcgcaaagagtacggttcaaaccgtaaatcaaggtggcaccgcgggtgaagtatatacgctcgtccttgacagaaacgataattctgtcaagggcgggcttttttgtgttcctgacagaagctgaattaatcacaggaggtgtttccatgtatccaacattagaaaccatcaggcagcttgcacagacaaaagaatatcgtcgtattcctctgtgcagagaactttatgcagacagatatacaccggtagaggtaatgcgcattttgcgaaaggccagccgccattgttacctgctggaaagtgccagccagacagaagcgtggggaaggtattctttcctggggtatgaaccatccatggagattacctgtacagacggaacattgaagattcggacaaccgatgctgagggaaaaacagaggaaaccgtaaagcaggtcacacatcccggtgatactctcagagaaatcattcggaaatataaaaccccggtaatggaaaagatgcctccttttacaggcggtctggtaggatatttctcctacgattatatcaaatacagtgaaccaaagcttaaactggaggacagggaacagcaggatttcagggacatggatttaatgctttttgatcaggtgatcgtatttgaccatttcagacagaaagtacttctcatcacaggtgtgatgacagatgatctggaagcttcctacgagaaagcagtaaagaagttggaggaaatggcccagctgatccgaaacggggagcatatggaatttgaaccgctgaaacttcagtcagaaatacagccgaaatttccgaaagaaaaatatgcagagatggtggagaaagcaaaacattacatcagagaaggcgatattttccaggtagtgctttccaatcccatgcgtgcgaaagcaacaggaagcctgtttgatacttaccgggttcttcgggcgtctaatccctctccttatatgttttatttctccagcgatgacattgaactggcaggtgcttccccggaaacccttgcaaaactggaaaatggtaccttaagtaccttccctctggcaggaaccagaccaagagggaagacaagagaagaggataaagaacttgaagagggacttctgaaagatgagaaagagctggcagaacacaatatgctggtagacctgggaagaaacgatattggaaagatcagcaagatcggaactgtaaaagtagaaaagtatctctgcgtagaacgtttttcccatgtaatgcatctgggctccacagtaacaggaatcatccgggatgataaagacgctgtggatgcagtagacgcaatccttccggcaggaaccctttccggagcacccaaattcagagcctgccagatcatcgaggaactggaacagagtaaacgaggcatttacggaggtgccatcggatatctggattttgcaggaaatctggatacctgtattgccatccgcctggtttataagaaaaacggagaaatctgtatccgttcaggtgccggaattgtggcagacagtgtaccggaaaaggaatttcaggaatgctgcaacaaggcaagagctgtggtacaggcaattgaacaggcacaggagggattagaatgatattactgatcgataattatgacagcttttcctataacttatatcagctcatcggcgcagtggaaccggacatcaaagtagtgagaaacgatgagtgtacactggaagaaatcgcagagatgaaaccggaagccatcattttatcccctggtccgggaaggccggaggatgcaggtatctgtattccggtgattaaagaatttgcaggaaaaatccccatcctgggtgtgtgcctgggacatcagtccatctgcgaagcctttggaggaacagtttcctatgcaaaagagctgatgcatggaaagaaaaagctgatgtataaaacaggagaaagccggctttttaaggacctgccggatacctttgcagcagccagatatcattccctggcagcgttaaaggataccctgcctgcagaacttaaggtgacagcagagtcagaggacggagaggtcatggcagtggaacatacaaaatatcctgtgttcggagtacagtttcatcctgaatcggtaatgacaccggacggcagagtgatgatagagaactttatggaggtagtgagaaatgattaaggaagccattattaaattatcaaagaaacaggatttagcttatgcggaagcagaagctgtaatggacgagattatgagcggtcaggcaacacctgtacagatgtctgcttatcttactgcattagctttaaaaggagagacaattgatgagatcacagcttccgcagcaggaatgagagctcactgtatcaaacttctccacaacctggatgtgcttgaaatcgtgggtaccggcggagatggttctaattccttcaatatttccactacttcttctctggtgatcgcagcaggcggtgttccggttgcaaaacatggaaacagggcagcatcctccaaatccggtgcagcagatgttctggaagcactgggagtgaagattacactgacgccggaacgcagtgcagagatcctgaaaaagatcaacatctgcttcctgtttgcgcagaattatcacattgcaatgaaatatgtggcaccaatccgtaaagagctaggaatccgtactgtatttaacattcttggaccgttaagtaatccggcaggtgcaaacatggaactgatgggagtttacgatcagtcactggtggagccactggcacaggttatggcaaatctgggtgttaacagaggaatggttgtctatggacaggacagtctggatgagatttccatgtgcgcacctacttctgtatgtgagatcagggatggcaaatttacttcctatgagatcacaccggaacagtttggatatgagagatgtgagaagggtgccctgacaggtggtacacctgcagaaaacgcagagatcacaaaagcaatcctgaagggtgaggaaaaaggtccgaagcgtcaggcggtatgtttaaatgcaggtgcagcactctatatcgcaggaaaagccgcttccatagaagaaggagtgaagctggcagaatccctcatcgacaacggtgcagcactgaaaaaactggaagaatttgtagaagagacaaataaataaaaagcaacccccaattactaatgtaaaggaaatctgtaactgtccggtaatctgctgactgtggatatacagaacagttacagaaaaatcatagagattatgaagaatatattagaagaaatagcagccagaacaagagaaagaattgcaaaagaaaagtcctgtatttctgtttcggagctggagaaccggattcaggaagtaaataaaaatgcagggcagaaaatcacatttctccaggcattacaaaaagatggtatgtcctatatctgcgaggtaaagaaagcctccccctcaaagggactgatcgcaccggattttccatatctggcaattgcaaaggaatatgaacaggcaggtgcaagtgcaatctcctgtctcacggaacctttttatttccagggagcagaccagtatctgagagaaatctcagccgctgtacagatacctgtactccgcaaggattttacagtagatgaatatatgatctatcaggcgaaatcccttggtgcttccgcagtgttacttatctgtgctatcctggatgacggagaattaagagcatacagacagcttgcaaaagagctgggactggatgcactgatagaagcacacgatgagtacgaagtgggcagagtcttaaatcttggggcagagatcgtgggagtcaataaccgggatctgagaacctttcaggtagatatgaacaacagtatccgcctgagaaaaatggcaccggacaatgtagtttttgtttccgagagcggaatccgcaccccggaggatatccgaattctttatgagaataaagtggatggggtactgatcggggaaacactgatgcgaagcccggacaagaaagtagcactggaaagcctgaatggcagcccgttacgctgaaagatcgaatattatctgagaggatagaatatgaccagagaacaacagcaaagaaccaaaatcaaaatctgtggtctgaaacgcccggaagacattacctatgtaaatgaagcaaaacctgattactgcggatttatcatagaatttccgaagagcagcagaaatgttacaggtgcgttggtgagagaacttactgcaaaacttaatccggacattatccctgtaggtgtttttgtaaatgcagcacttgagcgtgtggaggaactgcttcttgacggaactatccatattgcacagcttcatggacaggaagatgaggcatatatacggagaatccaaaagaatacagggcatcaggttataaaggctttttccgtaaaaacagctcaggatattgaaaatgccatgaaaagtccggcagattatatactgcttgatcagggtggcggtggaaccggacagacctttgactggtcactgatcccggagatagacagaccgtttttcctggcaggaggactgggggtggaaaatctggaaacagccgtccggactattcatccctatgcagtagatctgagcagcagtgtggagacggatggaatgaaagacagagataagattttgaaggcagttcaactggtgcatataaaataagataaccgaattaagtaagtcacctgcttcaattgcgaaaagcaataagcagtgggtggggacttgcttgtatcaggaggagtgcaagctccttctgataaactgcggagcagttattcggttatgagcaagtagcgaagcggattgcgaatatccgcttgatcaattcagaaagaacatagaatactctgaccgaccatctgacaggccagggattacatacataaaaggaggacatatacagatgtcaaaaggaagattcggcatccatggaggacagtacattccggaaacactgatgaatgctgtcatcgaactggaagaagcctacaaccactataaagatgacccggagtttaacgcagagcttacagagcttctgaatgaatatgcaggaagaccatcccgtctctactttgcatctcacatgacagaagatctgggtggagcaaaagtatacttaaagagagaagatttaaaccatacaggtgctcacaaaatcaacaatgtacttggtcaggtacttcttgcaaaaaaaatgggcaagacccgtgtcattgcagaaacaggcgcaggtcagcatggtgtggcaacagcaacagcagcagctcttatgggtatggaatgtgaaatcttcatgggaaaagaagacacagaacgtcaggcattaaatgtatacagaatgcgtcttctgggtgcaaaggtcaatgcagttacttccggtactgcaacactgaaggatgctgtttccgagacaatgagagagtggacaaaccgtatttccgatacacattatgtacttggttctgtaatgggacctcatccgttccctacaattgttcgcgattttcaggcagtgatttccaaagaaatcaaagagcagatccttgaaaaagagggcagacttccggatgcagttcttgcatgtgtaggtggcggatccaatgcgatcggaacattctacaattttatcaatgacaaagatgtccgtctgatcggatgtgaggcagcaggacgtggcgtaaatacggcagagacagcagctaccattgcaaccggcaaattgggaatcttccatggaatgaaatcttatttctgccaggatgaatatggtcagatcgcacctgtatattccatttccgcgggtctggattatccgggaatcggaccggaacatgcgcatctctatgatacaggacgtgcagaatatgtacctgtcacagacgaagaagcagtagaggcatttgaatatctctccagaacagagggaatcattcctgctattgagagtgctcatgcagtagcctacgcaaagaaaattgttccgcagatgagaaaagaccagatcgtggtcattacaatttccggacgtggagataaggactgcgcagcaatcgcgcgttacagaggggaggatatccatgaataagagaattacagaagcatttgaaaaaggaaaggcatttatcccgtttattacctgtggagatccgtctctggaagtgacagagcagcttgtctatgcaatggaggaagctggtgcagacctgatcgagcttgggattcccttctctgatcccacagcagagggaccggtgatccagagagcaaatgtgagagcactttccggtggtgtgactacagataaggtatttgacatggtggtaaagatcagaaagaacagttctgttcctatggtgtttatgacttatgcaaacgtggtattttcttacggaacggagcggtttattaaaacagctgcagaaatcggaatggatggtttgattctgccagatgtgccatttgaggaaaaagaagagtttgacagtgtatgtaagaaacacggtattgatctgatctctctgattgcgccgacttctcatgagagggtcgcacagattgcgaaggatgcggaagggtttgtgtattgtgtttcttctcttggtgttacaggaacaagaactaatattactacggatatcggagctatggtgaagttagtgaaggctgtgaaggatattccatgtgctgtgggatttggtatttctacgccggagcaggcgaagaagatggcagcacagtcggacggggctattgtgggatctgctattgttaagttgtgtgcagaacatggagcggactgtgtaccgtatgtgaaagagtatgtgaaagctatgaaggatgcggtaatggaagcttaaatattgaaaaggggacgcgcagaaacatatttcatttcgtgtgcggtttccgagcctaagaacttctaagctgctaaaaatatgtttctgcgctgtgtattggtatgaactggagtaatttgtatcttttataaaaaggatttcagaatctgcagaactccgttttcccagtagggtgggcaggtatccttggcagcagcttgtacttccgggcgggagttggagactgcgtagctgagaccggcattctgaagcatttcaatatcgttgaggttatctccgaaagtgcaggtttcgtcaggtgaaattcccagatattcctgcaggaaagcgacggaaggacctttgccggaacctggggcagtacagtccatccattccttgccggcggcagccataactgttttgtctttccaggtgggagtgaataaaggggcgcacatttcctcacaggcgttggggtggtagacagcaaatttgtttacctgctgcccctcgagttttaacatttccggaacttcatggatatcatatccgtaagaatctctcagccagtgaaacatctggctgcctccgtcttctgcgaaacagcgttcaggtgtggaaataaaataatcacaggaaggcatattctctcttaccatagaacacatttctttccagatttcgtccggcagagtatccactttcagaatctccttcggagtccgtacaacagttcctccgtcagagatataaagcagtctgtctgcgacaggggcaaacagcttcctctcacttcgatattgccgccctgagcatgccacaaacacaatccccttatcaatcagccttccgataacttccatatactccctgtcaatagccagagtcccatccttcaccagagtcccatctatatctgaagcaatcagcttaatcataaaaatcaaatcctttctataataaaataccctctcattctatcacgcttaaatataacttgccatacaaaaatatttgctgatatccttaaactttttgcccgccaaaccccattgacttttccacccttttttcttatattatataaatagaaatctgcgtactctgaaaactacgcatttaaaccctgaaaaaaggagagttgctcgaaatgaacaaaaaaatgctctttgttttcaatcccaaggcaggcaaaggcaagatcaaaacaaacctgcttgatatagtagatattttcaacaaaggcggttatgaagtcattatctattccacacagaaaccaaaagatgcctacgagaaagccaaagaatacgaatccaaagtagatcttatcgtatgcagcggcggagacgggactcttgatgaggtggttaccggagtaatggaaaagaagagttccattcccatcggatacattccggcaggaagcaccaacgactttgcaaacagtctctttatgccgaaaagcatgacagatgccgcttccatgatcatggaagagaaactttatcactgtgacatcggcagattcaataaccagagctttacatatatagcagctttcggtcttttcacagatgtagcctatcagacagatcaggatctcaagaatatccttggccatgtagcctatcttcttgagggagtgaaacgcctttttgatatcaaatcataccatatgagaattgaatccgaagaattaactgtggaggatgacttcatctttggaatgatcaccaattcccgttcagtgggagggttcaagaaccttacaggcaagaacgtggatatgaatgacggactttttgaagttaccatgatcacaagaccgaagaatccgctggaattgcaggagatcatgactgcaatgctgacagcagaggacaatacagatctgatccattcttttaaatcagccagggtgaccattacctcagaagaaccggtaccatggactctggacggtgaatacggcggcagtcatacacagatagagattgaaaactgccacgaagcactgaatctgtatctgaaaagtacaaaaaatgaggaaaccagatcaattggaatttccccgttaataaataaaaaggagaaataaaatgggtgagtatatcaatgtagtagagacttttggatgtgacgtgtttaatgattccgtcatgcaggcacgacttccgaagaaaatctacaaagaattgaaaaaaaccatagaagagggcaaagaactgtctatggaaattgcggatgtagtagcacacgagatgaaagaatgggccatcgagaaaggtgccacacattacagccactggttccagccccttacaggtgtgacagcagagaaacacgatgcttttatcacagctccgatggataacggcaaggtcctgatgtctttctccggaaaagaactgatcaaaggtgaaccggatgcatcttctttcccgtctggtggattaagagcaacttttgaagcgagaggatatacagcatgggactgtacatcaccggcttttgtccgtcatgatgcagcaggcggaacactctgtattcctactgcattctgttcctatacaggagaagcacttgaccagaagacaccacttcttcgttctatggaagcaatcaacacccaggcactccgtctgctgagacttttcggaaatacaacttctaagaaagtaactccgtcagtaggagcagagcaggaatatttcctgattgataaagagaaatggcttcagagaaaagacctgatctatacaggcagaaccctttttggtgctatgcctccgaagggacaggaaatggatgaccattacttcggaagtatccgtcagagaatttccgcatacatgaaagaggtaaatgaagaatgctggaagcttggaattcctgcaaagacacagcataatgaggttgctcctgcacagcatgagcttgcaccgatttatgcaccggtcaatatcgcagcagaccagaaccagatgatgatgcgtatccttaaaaaggttgccagccgtcatggaatgcgctgtgtccttcatgagaaaccatttgcaggtgtgaacggttccggtaagcataacaactggtctcttaccacagatgacggaatcaatcttctggatccgggcaaaacacctcatgaaaatattcagttccttctggtccttacctgtatcctgaaagcagtagatgaacatggagatcttctgcgtgaatctgcggcagatgtgggaaatgaccagagacttggcggtcatgaggcaccgccggcagtgatttccgtattccttggagagcagcttgaggatgttctggaacagctggtcagcacaggaacagcaactcacagtaaaaagggaagtaagctggaaacaggtgttaagactctgcctgatttcatgaaggatgccacagaccgtaaccgtacttcaccttttgctttcacaggaaataaatttgaattccgtatggtaggctcaagagattctatttccgcatgtaacgtagtcctgaacacgatcacagcagaagtatttaaggaagcatgtgaccgtctggaaaaagctcctgatttcgaactggcggtacatgacctgatcaaagaatatgccacagatcatcagaagatcgtatttaacggaaacggctatgcgccggaatgggagaaagaagctaaacgccgcggacttccgattcttccgagcatggtagatgcaatccctgcacttactacagagaaggcagtgaaactctttgaatcttttgatgtattctcaagagctgagcttgaatcacgtgcagagattaaatatgagatttactctaaagcaatcaatattgaagcaaagaccatgatcgacatggcaaccaagcagatcattccggcagttatcaaatataccactgttcttggcgaatccatcaatacagtgaagacagcaggcgaagggctgatcgatgtaagtgtacagcttgacctgcttaagaaagcatcaaaactcttaaaggctgcaaacagtgccatgagtaagctgagcaaactggttgagaagaccccggaatatgcagagggacgggacagagccgtattctgcagagaaaaggtggttcctgcaatggaagctttacgtgagccggtggatgaactggaaatgatcgtagataaggaaatgtggccgatgccttcttatggagatcttgtatttgaagtataatgttgtaaaaatataaagaagaatgctataatgaaagggtcgtgaatctgtaaaagataagcggcctttttctataacacaaactggactataatagttatataaaggagaactaaatggaagaactgaaatttctggaggagcagcaggtagcccctgaactgataaagagagtagaagaattccgcagccggtatgaggtggcaccggagaccgtagacaggattgtgaaaccatccattccattttacggaaaagacattctggaaatggccattgccggactgctcaaaggggagaatctattactcactggtccgaaggcaacaggaaaaaatatccttgcagagaacctggcatatattttcaaccgtcccgcgtacaatgtttcttttcatgtaaatactaacagcggagatctgatcggcacagacactttcgtggacaacgaagttaagctccgcaaaggaactatctatcagtgtgcagaatacggtggtttcggaatcctcgacgagattaatatggcaaagaacgatgcagtttccgttcttcatgcaactttggattatcgccgttccatcgatgtcccgggctatgacaaaattgatcttcatccggctgcccgttttatcggaactatgaattacggttatgcaggaaccaaagaactcaatgaagcgctggtatccagatttctggtcatagacatgccggctcagactgaagaatccctggaatttattttccgccggatgttcccgaatataaaagaaaacgccagaacacagttcatcggagtattcctggatcttcagctcaaagccacaaacagtgaaatttccaccaaacctctggatctgcgaggtctccttgcagccatgaagattgtagaaaccggactttctccgagaaaagcagttactatgggagtggtgaacaagacctttgacattttcgagaaagaaatcgtagaggatattgtgaaaaccagaattccggcagactggacaagggatgatgtatatgaaagatgagaaaatcgtagaaatcgacgattaccgtctggaactagaaaacaggatccgcaatctcctctggactatcagcggggattacacgttaaatatgaaagtagacgtttccctgtatctgcgctcaaaagcaatcgctctgtatgacggcatcaagcagggcgctctggcaaaatattatgacagaaatctgctgggtttatatctggtaaaaaaagttttctgccaggcaggagagggagaactgactgcagtagcacagctatgtgtagaagaagcaatcggggacaaaatctgtcaggaacgtccgggagtccgggagatgcagaaggaagcattcgaggatatcctggatcaggagtttgaacggatgcccgcatacggagatattcttggccgattgaagattgccatcctgcgtgaccgtttacagaatggaaaccattatgtagaagagcgtcttcgggaaatccgcgacatggtttacaaagccagaacagctgcagacactatagaattgatccgtattattgacagtctttacaacactatcattgatccgaattttgagaaagatcatggaacactggaacaggttatggcagtcaccctggaagaactgacagaatacgactgggaagattttcttacagaagaactttatgaggaagctctggagagttacatcgaacagatgacaaataagattacggacatggaagacactgctgtcactgaagaaatggaaaaacagcgccagaccaaacacaaaattacaattctcacagaggaagaacttgagaaagcatacacctatgttgagttgaatttcggaaaaacttatctgactcctgcagaagagaagcgaatgaattatctgatgtgtagggaacttcacagggactgcagcctttattttacagaaggaattcttaagaatccggtcaaacgaaactatcagtacgaatatgcagtgcgattaaagaataagaatatctggctctaccatgacaaacacagaatcgtaaagcagaacatcgcatccctcacagaccttttacgaaagacactggtgctgaaaagcgagacgcaggaagtactgtcagacagaggaacgatcattccgtccagactctggcgtgtgggcagaagcagtgaagcaaatctgtttaaaagagaattgaaatctgatgcatctgatttcgtagtagatgtgctgatcgatgccagcggttcccagatgtccaggcagggagatgtggcattacaggcttatatcatcagtgaagcattaagtaatgtaaacctgcctcaccgtgtcatgagcttctgcacattctgggactatacgatccttcacagattccgtgagtacgatgatccacagtcagctaatgaaaatatttttaattatgtaacttcttccaataacagggatggacttgccatcaaaaccgcaggatacggtctgcttcagagatctgaggagaaaaaaatcctcattgtattaagtgatggaaaaccatatgatgtcatcgtaaacagacctcacgcaaagaacccggaaccttatatgggaaaatatgcgatcaatgatactgctacagaagtgcggcacctgcgaaaccttggagtaagtgttctgggagtctttgcaggggaagaaaaggacctatccacagaaaaaaagatatttggaaaagatttcgcatatatccgggatatttcgaatttttccagaattgttgggagatacctgattaaacagttggattcagatgaatagactgataaaacagggaaaaaatatgctgtttgagcgtgttgatatgttaagagattatcaagttagcacgttaatatggtaaagtgcataaaaaaccagttttttcaccttgcctttttgtataaatttcgctataatgttctatgtttataaatcaatacaaaagggagaggaaatcatgaacgaaaacaaagagttcaaaccgtatattccggctgacaagatcacacctgaatttacggtgacatccatcatcatgggtgttatccttgcagttatcttcggtgcagccaatgcttatcttggtctgcgtgtaggtatgactgtatctgcttccattccggcagcagttatttccatgggcgtaattcgcaagatcatgaaaaagaactccattctggagagcaacatggtccagacaatcggttcagccggtgaatcactggcagccggtgcaattttcacaatgcctgctctgttcctttgggcagaagaaggactttgtgaaatgccgggtatcgtggaaatcacattaatcgcactttgcggtggtgttcttggtgtactttttatggtaccacttcgtaacgcactgatcgtaaaagagcatgcaacacttctttatcctgaaggaactgcctgcgcagatgttcttcttgcaggtgaagagggtggtgcaaacgctgcgacagtattctcaggtatgggaatcgcagcgatctttaaatttgtcgttgacggtttaaaggtaatccctgcagacgttgcagtagcatttaaaggattcaaaggtgaaattggtatggaatgctatcctgcacttctcggtgttggatatatcgtaggaccaagaatcgcatcctttatgtttgttggttctcttattggctggatggtgctgattccggtaatctgtctgttcggagctgatacagttatgtatcccggaacagaaacaatttctgctctttatgcagcaggcggagcatctaaaatctggagtacttatgtaaaatatatcggagcaggagctatcgcaacaggtggtattatttctctgatcaaatccctgcctctgatcattgcaaccttccgtgattccatgaagagcatgaagggtggcaagaatacaagtacagaaagaactgcacaggatcttccaatgaacgttatcctgatcggtattgtggcaatggttgcgatcatttggcttgttccggctatcccggttaacccgatcggtgcgctgattatcgtaatcttcggcttcttctttgcaactgtatcttcccgtatggttggtcttgtaggaagctccaacaaccccgtatcaggtatggctatcgctacacttctgatcgcaacaatggttatcaaagcatccggcaataccggtatcgacggaatgaaagctgcaattgctattggttccgtaatctgtattgtagcagcaatcgcaggtgatacttcacaggatttaaagacaggttatcttcttggtgcaactcctaagaaacagcagatcggtgagcttatcggtgttgttgctgccggtcttgctatcggtggtgttctttatcttctgaatactgcatggggatacggaagtgcagaagtacctgctcctcaggcaactctgatgaagatgatcgtagaaggtatcatgggcggcaagcttccatggacactggtatttatcggtgtattccttgcaattggtctggaaatcttaagaattccggttatgccatttgctatcggtctttaccttccaatctacctcaacgctgctatcatgatcggtggtgttgttcgtatgttcgttgacggaagaaagaatgttgatgataagaaaaaagaagaacaggcaacagacggtacactttattgtgcaggtatgatcgcaggtgaaggtcttgtaggtatccttcttgcaatccttgcagtagtaaacgtaagcagtgtatttgatctctccggaagcattaaccttggtaatgcaggcggcgtgatcctgatgttacttatgatcttaagccttctgaaattcagtatctggaacaagaagaaagcctgatcaggcggagatgataatatttaaatgagtaaaaagaaaaaagaattacagatcaattatctggatctcattcctgagcgcagtgcacagcttcgctggcatacggatatcagggggagaatggtgctggaaatagagaataagggcgcgtttaacacgattgcccagaagctgtttggaaaacccagatatacgaagatacatctggatgacaatggcacatttatctggccactcatagatggcaggaaaacagtggaagatattgctgcactggtaaaagacgaatttggggagaaggcagagcctttatatccaaggatcgttaaatacttccagataatggagagttatcattttgtaaattttatcaataagcctgaaaaataaggtaagaataagagcgggagcagtccttcatggattgctgccgttcttgtagtttatggaagaataattacggcacagtgataaagcggtatctctggctgatattcatgaaagcataaaacaaatattatttttacagaatacaaggaggcgaatgaatgaagttagtaaatggaaaaagatcacagcttctggaatatctgatgatcatagcaggaaccggattaatggcactggcgatcaattccgtatttgatgcatcaggtatggtaaccggaggcttttcaggtatcgcgatcattataaaagcagggagtcagggaatcattgacggtggtatccctctctgggtaacaaatatgggtttgaacattccactgtttctgatcggatggaagattaatggattctcctttgtaaaaaaagctttgataggagaaattgctctgtccacctggcttgccatagaacctgtatggaatcttgctggcaatgatcttcttcttgccgcactttacggtggtgtgatccagggtgtgggaatcggtcttgtctttctgggcggtggaacaaccggaggaaccgatatgatggcagctatcatccagaaatatctgcagcaatattcaatcgcacagatcatgcaggttatagatgcaggcgttgtactggtgggtatgtatgtgtttggcatccacaaggcactctatgcgattattgcggtatatctggtgacaaaagtatctgacggtttgattgaaggtctgaaattctcaaaagctgcctatatcattacagcaaagccaaaggaaatagcagatatgatcatgaaagatctggacagaggtgtaacaggcatcagtgccagaggaatgtactcaggacaggataaactgatgcttttctgcgtggtaaataaaaaagagatcgtaatgcttaaagaaaaagtagatgaaattgatccggaagcctttgtgatagtgacagatgccagggaagttcatggagaaggttttattgaaaaaaagtaacacaaaaaaatatataaaaaattgtaaatttttttctctttcctctttcatttttggtaaatatatattaaaatacaatacaggtataaggttttatagttaaaacggaaaataaacactataggatgagaagggattgaaatcagatgatatcgaatcaggtgcttcagaatactcttgaagggttaaaagaaatttccagaacagaattttgtgtactcgacacagaaggcaaagtgcttgcaagtacttttgcagatttttccattgcaacacaggatgtacaggctttcgtagaatcacaggccgacagccagcttgtaaaggggttccagtattttaaagtctgtgatgactatcagctggaatatatactggttgcccatggcgacgatgaagatacttatatggttggcaagctcgctgcttttcagatccagaatctgatcgtagcgtataaagaacgctttgacaaagacagctttatcaagaacctgcttcttgacaacctgcttcttgttgacatttataatcgtgcgaagaaactgcacattgaggcagatgttcgccgcgtagtcatgatccttgaaatgccacaggagaaagaccacagctccatggaaagcgtgaagagtcttttcggcggtaaaagtaaagactttatcacagcagtagatgagaagagtattatcgtagtcaaggaacttgaagatggtgagaattatcctgagatggatcagcttgcacatactatccttgatactcttggaatgggaaatgacggtaagacacatatggcatacggtactatcgtcaatgaactgaaagaagtatcacgctcctataaagaagcccgcatggctcttgatgtaggtaagattttcttcggagataaagaagtgatcgcatacagctctctgggaatcggacgactgatctaccagctcccgatcccactctgtaagatgtttatcaaagaaatcttcggcggcaaatccccggatgactttgacgaagagactctggtcacaattgataagttcttcgagaacagcctcaatgtttcagagacatccagacagctttacatccatagaaacactctggtctatcgcctcgataaactccagaagagtacaggtcttgatctccgtgtttttgaagatgccattacattcaagattgcactcatggtagtacgttatatgaaatatatggaaacactggaatactgatatattataatagaaggaaaattttcaatgcctgccacagctttaattgctgacgcaggcattttgacctttacaaatccagccttgcagtgtatagttagaaatcgagattgcaattgataaggtatgcaatatcccgagacatgcaagccaaaattccattgctgcaggcaatttggaatgaatgttggctgcgttactgtgaacattctatgaatcctcaaaaatctcttgcaatccccaaaaacatacattacaataatgttacaaattcattaacccattggaggaaaaatctatgatagatcttatagatgtaagcaagtcctatggtcccggccttccggcagtgaaccatgcgaacttacatatagataaaggtgaattcgtctttgtagtaggaaacagtggttcaggaaaaacaaccctgatcaaacttcttatgaaagagctggattccacatccggccagatcatcgtaagcggggaacgtctggaaggaatgaaacacagaagagtagccaaataccgccgtaagctgggcgtagtatttcaggacttccgtcttctgaaagacagaaatgtatatgagaatgtagcgtttgcccagagagtagtcaaccgtcccacaagagtaatccgtaaacgtgtcccggaggtacttcaggaagttggacttgctgtcaaatacaaatccttcccggatgaactttctggtggagaacagcagagagttgcattggcaagggcgctggtcaaccgtccggatatccttctggcagacgagcctacaggaaacttggatccgaagacttccgaagaaatcatgaagcttctggaacagatcaacgacagaggaaccacagtagttgttgttacacataacaaggatattgtaaattccatgcgcaaacgtgttgtgaccatgcatgagggctctattataagtgacgagaaagagggagaatatcatgaggcctagtacaatctggtacactctgaaacagggtgtcaaaaatatcaaaagaaactggatgttttccctggcttccattatcaccatggctgcctgtatttttctgtttggaatctttttctccattgtcaataatgtgaataatattgcacataaggtagagcaggaagtcccgatcacagtattctttgaagagggaactacaaacaaacagatcaaagcaatcggaaagaagatcaaggcacgtccggaagtagagaaaatagagtatcagtcagctgatgaagcatgggaggaatataaagagcagtatttccagggctcagaggcagcagacggatttaaggacgacaatcctcttgcaaactcagccaactatcgtgtgtatatgaatgatatcacgaagcagtcagagcttgtttcctatatacaggaattgaaacatgtaagaaaagtcaaccagtctgaggaagcagcaaaaacactgggaaatatcaacaagttggtttcctatatttccattgccatcattgtattactgcttattatctccatattcctgatcagcaatacggtatctgtgggaattgcagtccgtaaagaagagatcggaattatgaaatacataggagctacagacgcatttgtcagagcaccattcctgctggaaggcatggttctgggggtggtcggagcagcagttccgctgatcgtgctttatttctgttataatggggcaatatcctatattctgaccaggtttaatgtgcttacaggtgtggtggatttcatcccggtatggcagatttaccagacattacttccaataagtctgggacttggaatcggaatcggactgatcggaagtttctttacaacaagaaagcatttaagagtataataaaaagcagataagcatgaagctgccggaacaatgatatcatatcataaaccggcggctttttttacaggagtgcagacatgaaaaataaagaattttggaaaggtgcagtagcaggagcactggttgtgacgtgcatcggtacaggtgtttttgcaggaacaggtcttgcagcaaaaggaacagctcttggtgatcgcaagtgtacatcaaagctggcatatcttgaagagctgatcgacagatactatctgggagataaggatgaagaaaagcttcaggaagggctttatgcaggtcttctctatgggctggatgatccttattccagatattatacagcagaggaatacgattctgagaattcttccaatgagggaagctatgtggggatcggcattcttatggagaagaacaaagaaggcggagtaaagattgttgaatgctatgagggtggtcccggagaaaaagcaggactggaggaaggggacatcatcagtgccattgacggggaagatatcacagaggatgaagtatctgatgttgcagacattgtccgcaattcagataaagacagtgtggtgcttactgttcacagagaaggtgcagaagatgccatggaaatcacagtccctgtcacagatgtggaattaccgtctgttttccatgaaatgctggattctaaaatcggctacatccgcattacacagtttacaggcgttaccggcgaacagtatcaggaagcttttgatgacctgcaaaaacagggaatggagaaaatgatcgtggatctccgcgataatccgggtggacttcttgattctgtctgtgatgtcctgcggaaaatccttccggaaggactgatcgtttacaccgaagataaggacggaaatagagaagaggaaaaatgtgatggcaaaaacgaactccggattccgcttgcagtcctggtaaatgaaagcagcgccagtgcatcagagatttttgccggtgcagtgcaggattatggtattggaacgatcgtcggaacaaccacttacggaaaaggcgtggtacagtccatccgccagctctcagacggaagtgccattaaactgactgttgccaactactacactccaaaaggaaacaacatcaacaaaacaggaatcaaacctgatatagaggtttctctggataccagcctgctgaataagaataaagacgagatcacccatgatgaggataatcagctgcaggaagcgcttaaggcagttgagaaggaaaagtagttgtttggctgatagtttgatgttatactgtatatatctgtatttataatagaagcatttttattatagatgaaaagcccattactgagcaggcagcggattttgatttgtagttgctaagacactgaacagttaatgggcataaagtgaaaaatatcagaaaaagagggcgacaacatgagcgaatatgtgatcaccaccgacaacaattcagatcttccggaggaatatctcaaagaccatggagtaggctgcatgtatctcagttattccatggatggaaaaaattatacgcatggaaatttccttccggagcatgaattttatgaggcaatgagaaacggttccatgccaaccacagcacaggtaaatcctgaaaatgcaaaagcactgctggagccttacctaaaagaaggaaaagatattcttcatattgcattttcctctgccttaagcggtacatacaatagcagccgtatcgcagcagaggaactgatggaggattatccggaccgcaagatcatcgtggtagattctcttggcgcttcccttggtcaggggcttctggtttaccttgcacaggagaagaaagagcagggagaagatatggagacagttgcgaaatgggcagaagagaacaggcttcatatggtacacctttttacagtcaacgatttaaaccacctataccgcggaggtcgcatttccagaactactgcagtagtaggaagtatgctgaatattaaaccggtccttcatgtagacaacgacggaaaactcactgccatcggtaaagtccgcggccgtaaaaaatcccttcaggagctggtaaagcttatggatgagaaaatcggcagctatcatgacacctgccataccatctttatcagtcatggcgactgcgaagaagatgcaaattatgtggcagagaaagtaaaagaaaaataccagatcaacacgattatcatgaatcaggtaggagccaccatcggcgctcattcaggtccgggaacaatggcgttgttctttgtgggagatgaaagataaattagtttttttttgtaaaatggtttcatggtatcattatcctgcgggaagataaatgatactgcggaaccatttttgatattacaggagaattttatgaaattattaaaaaaagcattcgcattcacatttatatttatgctgagcgtttcaggactgacaggatatcaggtaaacgcctcagaggagccaaaacatctggatatcctcttcacccatgatctgcattctcatttgaacagctttcaaacgattgtagacgggacacagcaggagaccggcgggtttgcccggctgaaaacattgatcaatgagcatgagaaagagaatacagatacactcatattggatggcggagacttctctatgggaactctgatacagactgtatatgacactgaggccgccgaactgcggatgcttggatatctgggctgtgatgtgacaactctgggaaatcatgaatttgattacggctccgatggtctggcagatatgctgaacgccgcagtcagttcaggcgaaaaccttcccaggatggttgtgtgtaatgtggactgggatgcaatgaaaaaagccggtctcagtgaaggtcagaaacagatttatgaagcatttcagacatatggagtaaaagactatacggtaattcaaaaaggtgatgtaaagattgcagtactgggtgttttcggcaaggattctctggattgcgctcctacctgcgagcttcttttcaaagacccgtcagaagcagccagagaaacagtagaggaaataaaaaagaacgaagatgtagacatgatcgcctgtgtatcacacagtggaacatgggaggacgaaaaggtatccgaagacgaaatccttgcaaagaatgttccggacattgatctgatcgtcagcggacatacccacacacagttggcagaaccaatcctgcagggagatacctgcatcgtatcctgtggagaatatgggaaaaatctgggaacactttccatgactcagaaagagaatggacggtgggaaacggatacctatgagcttgttccggttacggatgaaatcaaagcagatgaagccacacagaagaaaatagatgaattgtcagatactgttgataccaattatctctccaattttggttataccagagaggaaattctggcagagaatgatattgaattcaacagcctcagtgagatggaaacaaagcatgaggagttaaatctgggagatatcatatcagatgcttatgtatatgcagtagagaatacaggagactctgacggagaaaaagtagatgttgcaatcgtacctgccggaactgtaagagatacttatacaaaaggcgatataacagtggagcaggtatataattccttctcgctgggaacaggaaaggacggacttgcaggttatcctctgatcagtgcatatttaacgggaaaagaactgaaaacagtggcagaggtagatgcctcaatttcagattttatgacaatagccagattatattgcagtggaatgaatttcacctataatccccaccgcatgatcttaaataaagtaacagactgttatctgacaggcaagggcggggaaagggaagaaatacaggacgataaattatatcatgttgtcaccgatctgtacacaggccgtatgcttggctctgttctggacaaatcctatggactgatatccatcatccctaaggataaagacggcaatcccatagagaacctggaagattatgcagtcatggatggaaaaaaagaactgaaagcctgggctgcaatcgcagagtatatgcaatcctttgaagacacagacaaagacggaattgcaaatgtgccggaatattatgatacaacacacgaaagaaaagttgcagacaacagcaaaaacatcataaatctgataaaacatccgaataaatttgcaatagcgattgtgggaatctgtattgtggctgttggggtgattttgttgctgatcttcggaattgtaaagattatcagaagaagaaaacagaatttatgtcaataaaatcgcataacagtagtagggcagtttctgattaacagggactgccttttatgctacgattatatttcctgatgaaatttcccacgacaattaatacaggaatgtatcatgttcacaaaaaatatgatatacttacgctgtatataagctagagtaaaaaacgggggaacacgaaatggctgaaatggaaaacagtaaagatctgatcagtgtattgtggagcggagcagatattcttcgctcaaaaatggatgcaaatgaatacaaaaactatcttctgggaattattttctataaatatctgtcagattcttttcttattaaagtatatgatatgatctgtgacagcaaaccacagacattaaaagaagcactggatgtatatgtaaaagaattaaaaagtgaagatggcgaagaactgaaacagggaatgaaagaagaatgccattatgtgatcgaacctgaacttacatacacatattttgcagacgccgcaagaaacaattcttttaatagagagcagctgcagaaagcattcaataatatcgaacaaagtgatcctatctttgcagacctgtttgcggatattgatctgtattccaaccgtctgggaacaggagatcagaagcagagcgatacagttgcaagtctgataaaggaaattgataaagcagatttattgaattcagatgcggaaatacttggaaatgcctatgagtatttgatcggacagtttgcatcagagacaggaaagaaagccggtgaattctatacgcctcaggcagtatccaaaattcttacccgcattgcaatcgcaggacaggaagaaaaacagggattatctgtctatgatccatgcatgggttccggctcccttttgcttaatgcaaaaaaatatgcgaaatattctcagtatatcaaatattatggacaggaattaaatacttcgacttacaatcttgcaagaatgaatatgtttcttcatggcattccggcagagaatcagaacctgagaaacggagacactcttgacggagactggccaacagatgaagaaacagacttcaatatggtacttatgaacccaccttacagcgcaaaatggaccgcagcagcaggctttctgcaggatgaaagattcagtgattatggggtgcttgcaccgaaatcaaaagcagattacgctttcttgctgcatggactctaccatctgaaaaataatggaactatggcaattgtacttccgcatggtgtcctcttccggggagctgcggaagggaaaatcagagaaaaactgcttcgctccggaaatatttatgcagtaattggcttacctgcgaatctcttctacaatacttcgattccaacttgtatcattgtgttgaagaagcatagagatggcagagatgtgctgtttattgatgcttcaaagaagtttgacaaaggcaagaagcagaatgaaatgacagatgtgcacatcaatgaagtgatggaactgtacagtaaacgggaaactgtagaaaaagaatcatttcttgccagttttgaagaaatagaaaagaacgactttaacctcaacatcccacgctatgttgataactttgaaaaagaagaagagatagacttgaatgatctattatccgagatgaagaaaacagatgacgaattagaaaaaacacagggtgaattcctggccctgctcagggatttaacttctacagatgacgtaattatgaaatcattagatgaactgattgcgaaaatggaggggtaaattatgggaaaacctgagattagatttaaaggttatacggatgagtgggaacagcgtaagtttggagatttagtagaaaaatatgaggatcctgtggtgactccaacggaaggttacacacgtcttggaattagaagtcatgcaaagggaacatttcatagctatgttgaaaagggaaaagaacttgaaactgcaaaaatgtttcgagtggcttcggacaaatttattgttaatataacattcggttgggaacatgcagttgcaattacagatgagaatgatgctggaaagcttgtttcacataggtttccgcaatattcttttaatgctggaatgattccaaagtttttcagatatctgatattggacaaaaaattcaaacatcatttggaattatcttctccaggaggagctggaagaaatagagttttaaaactaagcgatatgcttgaatataaaatgaatttcccatgtgaagaagaacaaagaaaaattgcagcttattttgatgatttagaccacctcatcactcttcaccagcgaaagtgtgatgaagtaaaaagtttaaaaaaatatatgttacaaaaaatgtttcctcaaaacgaacaaaaagttccagagatcagatttgagggatttacggaagcttgggaacagcgtaagttgggggatgtccttgatgatatgtacaatggacaaactccatcaagaaacaaaagtgaatattggaacggaaatataaaatggctgtcaagtggagaattaaatcgtggaacagtatatgacagcatggaaatgataacagaagacggtcaaaaatcagccaatttacggatagttcctaagggtacttttataatggctattacaggtcttgaagcggctggaacacgtggaaattgtgcattacttgggtttgatacaacactcaatcagtcatgtatggcattgtttccaaagaaagatttgcttacttcagattttttatttcaatggtatagaaaagtcggggaagagtacgggattaattatactcagggaacgaaacagcaaagctataatgctgaactgattaaaatactgccgatttcattgccttcggtagctgagcagagaaaaattgcctcttatttgagcaacctcgaccacctcatcactcttcaccagcaaaagtgtgaagaactgaaaaaaataaagaaattcatgctacagaaaatgtttgtctaggaaaaaggtgagcaaatggaaaaaattacgttatttcatggaacttcaagcagaattgtagtgccaacatatggacttggtgagaaaaaacatgattatggcaagggattttatttgacagataacttgaatcttgcaaaggaatgggctgtttgtaaacctgatgatgaaaatggctgggttcatcaatataaactggataccgaccgattaaaaatactggattttcaggaaaaagatgttctctcatggctggcggagctgatgaaacacagagatgcctccgattccaaacgttaccgggtgttatcaaaaaaatttattgagaaatatggaatagatacagaaggatatgatgtgatcaagggatggagagccaatgcttcctacttctatattgccaaagaatttgtaagagataatattgatatggatattctgacagaattgctttctcttggtggtctgggaatccaatattgtattaaatccaggctggcatatgagcacttgcaggaagtacaggacggtctgctgtctgttgattatatggaattcagagaaaaatataatcatcgagatgtttcagcaagacaaaaaatgcgggaattaattgattctgatgccaacaaagtaacgaatgtattcagtacattgctttaggagagaattatgagagcgtatgcagaagcttatttaagtgatgttgtagaaaatcagggaaagctgtttgattttgtagcacagtcattcccggataaaaatacagaagattttattaacacatacatgaagagtaaaacgagaaagagcatagatgaagctcaggcttatgtgaatacgatggatgtggaagatttatggtcgtattttcttaaaacagatcattacagattgcaggaaggagacaacttaaaaggttttattccggactggattggagagttttacgcatattatcagtggtactataatataccaagttcagaagttgttcagaaaattccggtggattttttgaagaaagcctattacggacttcatgatctggaacttgatctggcagtcagaaaagtaggtgaggtttaatgaatattatctgttttcacaatccgaatgaagaaaatggatatttgagtaactggtatccggctcatttcacagttgagggaatagaattttcttcaatggaacagtttatgatgtatcagaaagcatgccgctttcatgatgcttcagtagcaaaggagatattgagcacaaatgatgttgcggaaattaagaaattagggcgtgaggtacatgggtatgatgaaaatatctggaatggcgtaaggcagattgttgtctatgaaggactaaaggcgaaattcagtcaaaatgcagaattgaaagaaaaacttgttgatacaggtgacgcaatattggcagaatgtgcagtaagagatcagatttgggggataggtttatccatgagagatcccaatagacttgatcaaagcaaatggaaggggaaaaatctgttgggatatgctctgatgatggttagagagcagttgtaaatgccaatccttgggaacagcgtaagttgggggatgtccttgatgatatgtacaatggacaaactccatcaagaaacaaaagtgaatattggaacggaaatataaaatggctgtcaagtggagaattaaatcgtggaacagtatatgacagcatggaaatgataacagaagacggtcaaaaatcagccaatttacggatagttcctaagggtacttttataatggctattacaggtcttgaagcggctggaacacgtggaaattgtgcattacttgggtttgatacaacactcaatcagtcatgtatggcattgtttccaaagaaagatttgcttacttcagattttttatttcaatggtatagaaaagtcggggaagagtacgggattaattatactcagggaacgaaacagcaaagctataatgctgaactgattaaaatactgccgatttcattgccttcggtagctgagcagagaaaaattgcctcttatttgagcaacctcgaccacctcatcactcttcaccagcgaaagccaattccccatcccgaccatccaactatccacacgaaacacaaaggagaagaaaaatatgtcagaattagagtcaatgatagagaaaaaactaatagaacagctaatttacggagattcccagtggacataccgagaagatttaaagacggaggaggatctgtgggcgaatttcagatatattctggagcagaataataaggacagactggatggagagggactttctgactctgaatttgaacaggtaaagaaccagttgcagttttcctcattttataaagcaggggaatggttggtaggtgagaatggaaaggtaatggttcatgtacagcgggatatggaaaagttgcatcttgtagtgatgaaccatgagcatattgcaggcggttctagtgtttatgaagtgattaatcagtataaagcactgaaatcagatgatgaggattccacagatgtgcgggacagaagatttgatgtaactcttatgattaatgggcttcccatgatacatattgagttgaagaataaacagcattcttacatggacggattctggcagataaaaaaatatattggtgagggtaaatttaccgggattttctcagctgtgcagatgtttgtagtcagtaacggtgtggataccagatattttgcggcagcaggggatacagagttaaatccaaaatttatgagtggatgggtagacagaaagaataatcctgtttcagattatctcagctttgcaaagagtgtactccgtattccccaggctcatgaaatgattgccagatacacagttctggatgaagatgccagacggctgattttgctcagaccatatcagattcatgccattgagtctatacgtgaagcttcaaaaaccggagaatccggttttgtatggcatacaaccggttcgggaaaaacactgacatcctataaggcaacaagaaatcttttgatggatattccaagtattgataagacaatttttctcattgaccgtaaagatctggatacacagacaactatggcatttcaggcatatgcaaataatgatctggtagatgtggatgaaacagataatgtaaatgatttaaaaaagaaattaaaatcggctgaccgtcaggtgattgtaacgacaattcagaaaatgcagattctcataagtaaaagactgcaggaaggaacaccggactttgataaaatcaaaaatttgagggttgcttttgtagtggatgagtgccacagggcagtgacaccgaaaacaaagagagaactggaacgtttctttggcaggtctttatggtacggttttaccggaactccacgtttcgcagagaacccatatccacagatgggcgatttgccacgaacaacagaagaattatatggaaaatgtctccattcttataccatacagaatgcaattcatgacaaggcggttctgggatttcaggttgagcataatggtcctaaaaatatgacagatgagacggacagcagccagtatgacaatgaagcgcatatgttaaaggtgttggatgtgattttaaacaaatcctattataaattaggcctccagaatggaaagggaatgacatatgagtgcatgcttacaaccaaatccattcaggttgcacagaaatattatgagctgcttaccagagtaaagaatggagaaacttcacttgtgatcgatgagaaaatcagacaggtgcttccggattttcctaaattcgccatcacctattctgttaccgaaaatgaagaaggctcccatgtgaatcaggaaaaaatgcagaaatccctgaatgattacaatgatatgtttggaaccaaatatgaaatgtcccagatacagagctataatgccaatctgaataaacgtcttgccagaaaagatgccagatttaagagcagacgagaacagctggatctggtaattgtggtagacaggctgcttacaggttttgatgcaccatgtatgtctacgatttttattgatcgtcagcctatgggaccgcatgatctgattcaggctttttcaagaactaaccgtatttatgacaccaataagacatatggacagattgtaacttttcaggcaccaaagctctttaagaagtgtgtggataatgcggtgaaattgtattctgcgggaagtacagagacagcgttgctggcagaatgggatgaagtagagcctgcatttcgtaaagcactttctgcactgaaaatctgcgctgagaagccttcggacattccaggcatgtccatgaaagagaagaaaatttttgcaaaaatgttccaggagtttgacagcctgtttgcacagatgaaatcttttacaaagtatgacgacagtatgttggaaacgtatggaattacagagacagaatatgaggattatgcaggtcattataaaaatgtaatggaagagattcgtgattccaaagatcatggggattcagattccggtgatacacaggtggatcaggattatgaattgatggcatacagcagtaccaagattgattacgaatatattattaacctgatccagaatattgtaactcctacagaggaggatgaggaaattacaccacaggaacggctgaaaaagctggaagaagtaaaacagtacgtggcggagcttcgcaaagataatgaaaaagtagcagaccttatgtcaaatctgattgcagatattgagaaagatgacagaaagtacagaggaaagtctatccttaacattattgagaatatgaaacgagactgtgtggaaaaagttatctctgatttctgtattcaatggtatgcgtcaaaggatgatgtgatgtatgcggcaatccattacagaaatgggaaaatccccaatgaaacggcaattaaggcaactgttgattatactagctacaaagaagcacaggaaacggctttgccgaagtataaattttataatcgcatgatggcagaattgaagaaaactctggacgaagagataaaacctcttcttatgactgcataaatctatcaaatttatccgctccatttgcagaattgctatagttattacattgtgaatatcagcgcaggtaatttcggaaatggagaatgcttatgtcaaatgatacaaataacaatgtactgttttcgcagtattatgcacagtggattgatgtatataaaaagggtgcaattcgtgaagcaactatggcaaaatatctgatgacacagaggtgggtggagaagctggtgcctgaactgagggtgtcagagctgaccagaacagtatatcagcagcttttaaatgattatgcaagggagcatgagagacagactacgctggattttcatcatcagctgaaaggtgctattctggatgcggttgatgaaggaatgatagaacgagatccgaccagaaaagccatcattaagggaaaaactcccaaggccaagaaaataaaatatctgaatcagtttgaacttcatacattgatcgctgatctggatattaaggaagagccaaactgggactggtttattcttcttgttgcaaaaaccggaatgagattttcagaagctctggcgattactccggcagattttgattttggcaggcagacgctgtcaataagcaaaacctgggattataaaggtgaaggtggtttccttccaacgaagaataaatcttctgtgagaaaaattcagattgactggcagattgttgtaaaattctcagaactaaccaaaacacttccgcaggatcaacctgtttttgtgggagaatcaaaggtttacaattctactgtgaatgatgtgcttaccaggcattgcagaagatgtgggatatctgagatttccatacatggactcagacatacccatgcctcattattattgtttgcaggagtgtccattgccagtgttgcgcgtagactggggcatgcaagtatgactacaacacagaaaacatacctgcacattattcaggaactggagaacaaagatgtagatctggtgatgagaactttatcaggattataatctggatgatttagagaaattatctgcgctgataaaaagttactgctttttctgttacaggaggcatggaaaaaaatgtgaagtgtgatatactgttagttatcttataggcaggcattacagaataataaggagcttttgaatgagcgaacaaaaaagaaaaattggttttactgttgcgtgtgtaaatgaatttgccaataaacataatctaagtgccaaagaagcgtttcagtacctttttcaattcaaaggcatagctttcattaaagaaaattacgatgtcgagcatactctggattttgaaacaattttggaagacttagaaattttatgtaaaaaaaatggaggtacattattaaccaaataagctgtgaatcagttatttggctataagcaagtagagaaggtactattttagtaacatgatgcttggaaaaaacggaggttattaacagttaaatataaattataaaatcatataagcacatgctgagttttataagatattagagtagaatattattgaaaggagttgcttctttgagtaaatattattctatacatgaattttcaaaaattataggcgtatctgcccagacattacgaaattgggatgccaatggaaaacttcatccgcatcatactacagtaagtggctatagatattattctgatgagcaactcaaccaggtaataaatgtaaagcctaaaaaccgcattacaattggatattgtcgcgtttccagccataaacagaaagatgatctggaacgacagattgataatgttaagacatatcttttggcaaaaggacagccatttgagataataagtgatatcggttccgggattgattataagaaaaaaggacttcaggaattgatcaggcgaatatctcaaaatcaggttgaaaaggttgttgttttatataaagaccggctattacgatttggttttgagctgatagaatatatcgcttcactttataattgtgagattgagatcattgataatactgaaaaatccgaacagcaggaacttgttgaagatctggttcagataatcacagtattcagttgtaaattacaaggaaaacgagcgaataaagctaagaaacttatccgtgaactgatacaggaggaaacagatggtaaaagccataaaagtaatgctgataccaaacaatgtacagaaaactaagatgtttcagtacgcaggtgcttcaagatttgcttataactgggctttggccagggaaatagagaactatgaaaaaggcggcggattcatttcagatgcagaactcagaaaagaatttacgaagcttagacattctgatgaatatgcatggttactgaatatctcaaataatgtaaccaaacaggcgatcaaaaatgcctgtactgcgtataagaacttttttaagggtttgcagaaattcccaagattcaagtcaaaaaagagatcaatgccgaagttttatcaggacaacgttaagatacgcttcagtaatacacacgttaaatttgaaggcttttcttccagcaggaaagcaaataaacaaaaaatgaattgggtaagacttgcagaacatggacgtattccgacaaatgctaaatatatgaacccgagaatatcctttgacggattgaactggtggatcagcgtatgtgtagaatttcctgactgcagggaaacacttaatgatgacggagtcggcatagacctgggaatcaaatacctggctgtctgctctgatgggactaagtataagaacatcaataagagtcagaaagtaaagaaatcagaaaaacagaaacgcagattacagcgtagtatctctcgttcttacgagaaaaataagaaaggggaaagttactgtaaaacaaataatgtgatcaaaaaggaaaaacttttattaaaacgaaatcacagattaacaaacatccgtaaaaatcatttaaatcagaccatatcggagatcataaatcgaaaaccaagatttatatgtattgaagatctgaatgtcagcggaatgatgaaaaacagacatttatccaaagcagttcaggcacagggatttttctggtttagaaaacagcttgaatataggtgcagcgataaagggatccagcttattgtggctgatcggttttatccatcatcaaagctttgcagctgttgtggaaacatcaaaaaagatctgaagttatctgacagagtttatagatgtgcgtgtgggaatatgattgacagagatttccaggcatctataaatctcaagacttatggagaaaaatttgcaagctgacactgaaacgttaatgcaaatatgtacggatacgttagtccggaatttacgcctatggagagtacaggaacttgtgagtagattgatatttatatcatcaaaagcatactcgttgaagtaggaatggaacatagaagtttataactttttataagttttcagtaacggaacacaaaacaaatgcaccttgagttagccaaaacattgcgaaattacgacagaaaaaatttatcaaaggacatcctcaccgggctgatcattatggctgtctcgatcccgatttccatgggctatgcccagattgcggggcttccggcggtttatggactgtatggctctgtattcccgatcattttgtttgggctgttttccacatcgcctcagttcatcttcggagtggatgcagcacctgcagcgttagtcggggcggcactggtggaaatgggaatccagagtggttcgaaacaggcaatggcggttgtgccggtgctcacattttttgtggcagtctggctgtttgtatttgcatttttaaaagcaggaaaactggtaaactatatttccgcacctgtaatgggaggctttatcacaggtatctgcaccacgatcattctcatgcaggtgcccaaattaatgggcggaactgcaggaaccggagaattgtcggagctggcagagcatatctgggctacattagggcagatcaatctgccttccctgattttaggtctggtttctctggtcatccttctggtgatgaaaaaaatcctgcccaagtttcctatggtagtagttctgatggcagcaggtgtattattatcctatttcgtcccgatttccaactggggaatccgtacactggatgcagtagaaccggggctgcctgtatggagtattcctgatttctctgccattggtctaaaagaagcggtcatctacagtctgtcaattgcagtagtgatcatggcggaaactttacttggtgagaatagcttcgcacagaaaaatggttacagggtaaatgctaaccaggagctggtagccttttccatgggaaatctggcagcagctctgacaggctgttgtccgatcaacggttcggtgtcacgtaccgccatcagtgaacagtaccagggaaaaacacagttgaccggaattgttgcaggaatttccatgattcttgtgcttctgggagcaaccgggctgattgcttatctgccggttcctatgctgactgcaattgtaatctcctcacttctgggggcaacggaatttgatctggctgtacgtctgaggaaaatcagcaaaaaggaatgcctgatttactggggcgcattctggggagtgctgacgcttggtaccatcaatggagtattgatcggtattcttctctcctttgccgagatgatcatccgtactgcgaaaccggcacgctgttttctgggagtgcagccgggacacagacatttcgaagatcttacggaaagtctgcataactgtgagattgagggagtagtgatctaccgattcagcagcagcctgttttttgcaaacatagatattctacagcaggatattgagaatgccattggatcggataccaaagcagtcattctggatgccagcgggattggtagcattgatgttacggctgcagacaggcttgcaattctgtatcgttctctgaagtcaagaggaattcgtttctacataacagagcatatcgctgagctgaatgaacagatgcgcgcactgggacttgaatttatgatcgaagagggacgtgtgcgtcggactatacatgtggcattgaaggatatgggaatccattatccttatcctttgaagggcaatgtagataatacagaacgttctccgttcagaaagcgtgtggacaacagtgtacaggaatttgtctgggcttttggttctgattctgaggcagagatagagaaacagatccgtctgcagattgaacagctgaaagagaacggagatatgcaggagctgctccatggtcagtggaatcatatggatgaacttgatgcagatgcatggattgagcatctggaagagcatatgaaagaaattgtaaagatttccggacaggatgaacaggaattgaccgtacgttttgagaagcatcgaaaaaaactccgggaacagatgatgaaagagcatccggagctggtggcaatgttcgaggagcgcaggcggcttttggatgagcagcttgagagaaaatggccggatgtgtatgctctggttttaaaacagcgtgagaaagatagcaggttaaaataacaagcagtctggcatacaaatcagagcttctgaatcagcggatgttcccggtagtacatcctggtgaagttcaggaatttttgcatattgtcactgatgtatttcccctttttccatacgattccgatctttatgcggatgggtggactgaggggaattccttttatgccagaagaggcaaatctgtcggtcatgctggaatagagaaagctgccatacttgcaggtctttactagctgcaaaatggtataaatctggctgctgcgcatgacgatgtccggaatgtaaccgtccatttcgaaacgtgttttcaacaactggttctgtacggaatcggcattgaaaaagatcaaagattctttagacatttcttttgtggtcacaacttctttgtctgccagtcggtggtcatcacttacacaaaaaacaacctggtcgttggccagaagagccttgttaaatttatcaatattatactgttccatatttaccagagccagatccagagtgtcatcctgtaccagattgcaggcacgaacagagccatattcctccagaacaacagcgatttccggatattggtcatgaaatgcgatgagaagctcaggaaaaaagacggtgctcagcataggcggaattccgatacgaagagggggttttactctcgccatactggagtaatctgcctgaagctcggtgcagtactgaagaatgtaggtagctttgttataaagctcttcgccttcttcggtaagaatcagtcggtttccctttctatagaaaaggctgatgccgaattcaatttccagttcgcggatagcaacggacacagtgggctgagtaacgtataattcctcggctgccttggtgatactgtggcagcggcttgctgtgcaaaagtaacggagttggttaagtgtcataagtaaatacctctaagttcgttctatatgtcatttctatagcaattgcagtattttctggaactgctttaagctatcttcaaataaaaataccacatacctatcataatttccatatttatttctaaagttttttttaatgtagtaatattgcataaaaaaaacctgctaaaattgagattataaaaattttttatggggatatgcaacccattaatttgtttttttatacgtgcatgatttataataaactcatcaaaggaaacgtgcacggccggtacctttcaagagagattaataaaaaaaagacagataagtaagacaaaagcgaagagcaaaataaaaaatgaaatcacagaaaaaagtgaaaggagatcaataaaatgtctcaacaaacaatcacactgttatttcttgtgtttacgatcattagtttcatcctcgaaaagataccacttgggcttacagcttcgatctgtgcaatcggattgacactcaccggagtagtggatgtatctacaacgttttcacagtatgtaaacagtaacgtaatcctttgtgttggcatgtttgtagtaggccaggcactttttgaaacaggaatggcaaataaaatcggaggtctggttaccagatttgccagaacagaaagaacattgatcattgcaatcatggtaatcgtaggtgtgatgtccggatttttatccaacacaggtacagcagcagtgctgatccctgtagtctgtggaatcgccgatgaatccggctattcaagaagccgccttctgatgccgctggtatttgcagcagcacttggcggaaacctttccatcattggcgcacccggaaacctgatgggtgtaaacgcacttcaggaaatggggctttccacaagctttttcatgtatgcaccggtgggagtcccgatgcttctggtaggaattatctacttcgttttcattggatacagatttcttccggatggaaaaggggctgtaggggcaactgttgaaaaacagaaagatttcagtgatgtaccgaaatggaaacagactgtttcactgatagttctgatacttgtgattcttgcaatgatttttgagaaacagattggagtcagcattgagatttctgcatgcatcggagcaatcattctggtgctgtttggagttctttcagaaaaagaagcactggcttccattgatctgaaagtagtattcctttttggaggatctcttacacttgccaaagccctggacacaacaggtgccggtgaactgatagcagataagatcgtaggacttctgggtgcagacccgaacccgatcgtgcttcttctggtaatattcattgtaacctgtgcactgacaaacttcatgtcaaacacggccacaaccgcactgatgatcccaattgcagtttctctggcaaacaaccttggtgcggatccgagagctgttgttatcgcaactgttatcgcaggctcctgtgcatatgcaacaccgattggaatgcctgcaaacactatggtagtaggacttggaggatataaattcaaggattacgtgaaatcaggtttaccgttgattctggtatccttcgtgatctgtatgatccttttgcctgttctgttcccgttctatccgtgagaggataaaccatatgagacggaagattttccgcttaatgtaaatgtatcaatagaaataaagcagaaaacatgctgctttagataaataacccaaaattaaaagccaaacaaccctaaaccattgaatgatcaggaggtaaatcatgactaaggaaaatggagttaaagtattaacagacatggtagcagactttgttgcccacatcggaaaaaaattaccggacgacgtagtagaaaaactggaagaacttggctctcaggaaagtgcagcactcccaaaagtactttatgagacaatgaccaagaaccagggactggctgtagaactgaaccgtccaagctgtcaggacacaggagttcttcagttctggctgaaatgcggaactaatttcccgtacatcaacgagctggaagcccttttgaaagaagctgttgtacaggctacttttgcagcaccattaagacataactctgtagaaactttcgacgagtacaacaccaagaaaaacgttggaaaaggaactccgactgtatggtgggacatcgttccaaatagtgataaatgtgagatttacgcatacatggcaggaggcggatgtactcttccgggaaaagcaatggtacttatgccaggtgcaggatacgaaggtattaccgatttcgttcttgaccagatgacaacctatggactgaatgcttgtcctccgcttcttgtaggtgtaggtgtaggaacatctgtagagacagcagccctcaattccaagaaagcacttatgcgtccgatcggttctcacaatgataacgcaaacgcagcaaaaatggagaaacttctggaagacggaatcaatgcaattggccttggaccgcagggaatgggtggaaaatattctgtaatgggtgttaatatcgagaatacagcccgtcatccatctacaatcggtgtagcagtaaatgtaggctgttggtcacaccgccgcggtcacctgatcgtaaattctgaccttacagtaacctgtgatacacattccacatggaaattcaacgcataatcggagggaaaaaacatgatcgaaatcagaggagataaaaaagttcttattacaccaatcagtgaagaagacctggctgacatcaaaatcggtgatattgtatggctggacggagatctgatgacctgccgtgatgtggcacatcgccgtctggttgagtatggaagagaacttccatatgatatcaaggacaaagcaattttccacgctggcccaatcgttcgtaaaattgagggaacagaagatgactatgaaatggtttccgttggaccgacaacctccatgcgtatggagaaatttgagtatgaatttactaagcttacaggtgtaagagtaatcgttggaaaaggtggaatgggaccgaacacagagcgtgcatgtaaagagtttggtgcgatccactgtgtattcccggctggctgtgcagtagtagctgcaacagaggttgagaagatcgtagaacatcactgggatgagcttggaatgcctgagaccttatggtgcaacaaagtaaaagaatttggtccactgatcgtatctatcgatgcacagggccgcaacctgtttgaagaaaacaaggttatcttcaatgagagaaaagaagccgctaagcaggctatttatccggaagttaagtttattaaataatgcatttcagttttacaaaagtaaaaaccgtacgatttcttctttattgtttcaaagataaaaaaagataaacatcatctaagatgaaaagaaaaggtggctcacagattttcttcatacatggtctgtgggctgcttttttctgtatacgaaatttaaataaatagtaactttaaccgaatcaagtaagtcccctgcggaggttgcgaaaagcaataagcagtgggtggggactcgcatacaaatgattatgccactgctacatctttttcctccgccttgaaataaaaaaaattatcctgcaagattgtttcaggaattaacatgtcgacacattagagcgtgtctgaaaaatcattcccgcaatctgcacgccccactttgcgatatattttgtccgaattcggttgtcgtagcccatgaattttggcaagtaaagattatctgaaaactgaaaaaataggtataaaaaataaatatagggctgttgcaatgacggaaaataaggtatgatatctgcagaagcatgttacacgtttctataacccgggtgaagtaaatgaaaaaggcaataatctgttgagatatcttcaccggatagacacaaaatcatttggagaaagttatatgaaaaagtttaagttaaatgtacagagacatatctgcattttattatgctttattttatatattaccgtgcttccccttcctgtatcagcagaggaagcaaaatccaaaacagtcagagtaggctggtatgaaggaacttataataccacaggagcagacggtcagaggagaggctacagctacgaataccagcaggcagtagctgcgcataccggatggaaatatgaatatgtggagggaagctgggcagaactgatgagtatgctgaaaaatggacagatcgatctgctgggaggcatttcctatacagaggaacgttccacttccatgcttttttcagaattgcctatgggagaggataaatattacctgtatgtggatacttctaatacagatatctccatttcagatctgactacattaaatggaaaaagaatcggtatgctgccgaatgcacttcctgccgaaatgttccatgagtgggagaaaagtcatggagtgaacacgcagcaggttgatattaccggtgcagatgatgttcgtcagaaattgaaaaatcatgaaattgacggatttgttttaaatgaatctccacagtgggaaagagacgatatttctcctgctattctgattggtagctcctataattattttgcagtcagcaaaaaacgcccggatttgaaagaagagctggatcaggtaatgcagaagatagagagggagaatcctttttatacagacgatctttataaaaggtatctctctgcaaattcccttgaaactcttacggatgaggaacagaactggctggaacagcatggggcggtccggattggatatctgaaaaatgatgtgggtatcagccttgtggatacggagtcagagaaaccggtaggaattattaacgattatattagtctggtatccggttatctgggtgaacaagccatagaatttcaactgacaggttttgaatcccaggagaaagagctgcaggcattaaaggataacaggattgatatgatttttcatatgaaccagaatccatatgaagctgagcagaatgatattgtattgtcaaatactgtttttgaaattaatgttgcagtactcaccggtgttaagaagtttgatgaaaataaagagaatacagtagcagtgagcaggaataacctgctggggaagtggtatatttcttttaattatccattctggaaaataaaggaatacgactcatctgctgaggccgataaagcagttcaaagtggcgaggcagactgctttgttgtgaaggcaggacagtcattaaagacactggaggacagcaaaatgcgcagtatttttcttacgaaatccggcgcttcctgctttgcggtcaccagggaaaacacaacattaatgaatatcctgaacaaaaccattcagactctgcctgcttccagactttccagtcagttttacgtatatgaaaacgcaccgggcaaggttactctggcagaatacataaaggataatctgcgggtagtttccatttggtttgtaagtgtggtcttgattattgtatggattatagtttatctgctgatacaagcgagaaaagccaagattcaggcagaaaaggctaatgccgccaaatcagagttccttttcaatatgtctcacgatatccggacacccatgaatgccctgctgggatacagtgagctgataaaaagggaactgactgatccgaaacttctggattatcaggagaagatggaacagtccggaaatctgcttctgtctattatcaataatgtgctggacatggcccggattgaaagcggtaaggtggaactggatgaagattatgtgaagatcagagatatttatcagggaatttacaaaattttccaggcggaagcggagaaaaaatgtattcaccttaagatggaatatgatgtcaagcatgagcacgtaatctgcgatgagacgaagaacaaggaaattttcctcaatctgatcagtaatgcggtaaaatatacagcttcagggggaagagttaccataaggatcacagagcttgactgtgacaggaaagactatgtgcggatacggactcaggtaattgatacaggtatcggaatgagcgaagaattccttccatctctctttgaggcttttgccagggaacgaaatacaacagacggaaagattgcgggaacaggtctgggaatgccgatcataaagaagtatattgatatgatgtacggaactattgaagtagaaagtaagcagggagaaggaagtaaatttacagttaccctggaatacaggattgctgataagagctactatgaacaggatacggaaaaatcttcagatgtggatgaaacagacagaatcagcggaaaacatattttgcttgccgaggataatgatctgaatgcggaaatcgcacagtttatcctggaggatatgggacttatggttgatcgtgttgaggatggagttcagtgtgtgtcaaggatagaacagaaaccggcaggcacctatgacctgatccttatggatatccagatgccgaacatggacggctacagggcaactgagatgatccgcggactgtcagataaagacaaagccactattccaatcatagccatgacagccaatgcctttgaggaagacagaaaaaaggcactggcaaaaggaatgaacggacatattgcgaaacctgtggatattgagaagatgagagaaattctgcagaatacttttaagcgataatatggattacctcagagcgtgtttgaaaaatcatttcttgtggaaggtattttcaaacacatttcaggcaattgacagactgggaagggaatacagaaattaaatgaaagaaaaagaatcaatgagcagaacaggaaaaaggattgtatgcatatacatggttctaagtctgattctgacctgcatcctgtgtgcgacacccgccacagcaaaagctgcggaggaagaaaccatggaaagagttgtccgcgtaggttcctttgaggacacctttaattatgtcaatgagaaaggtgcaaggaagggatatggatatgagcttctggaaactctgtccggctatacaggatggaagtttgagtatgtcacctgtgactggtccaactgttttgaaaagcttagaaacggtgaatttgacattatgggtgatatttcctatacagaggaacgcgcaaagcagatgctgttttccgatgaacctatgggtgaggagaaatattatctgtatgcagatctttcagatacggatatttcagcttataatttccagacactgaatggaaaacgcatcggtgtgctgaaaggaacccagccggaagtcatgctcacagaatgggagcagaaatataacctggaaacaacacatgtgaatatagccaataataatgatgtgaaaagaaagctggcagatcatgaaatcgatgcctttgtttccctggaggagtctttatgggctgtccaggggatttccacagttgtaaatgtgggaaaatctggcatttattatgcgatcaacaaggatcatccggagatcaaagaagaactggataatgccatgcgcagactggaggatgataatccattttacctggcagatttgtataagcagtatttttccatggattatacaccgattctttccggtgaggagaaaaaatggctgaaagagcatggggccatccacatcggattcctgaaagatgatacaggcatcagcaccatagagatgcctgacggcagattcagcggtgcaatgactgactatattcaatatgcagcgggctgtctgggaaaccagaagctggattttaaactgacagaatataacagctacgaggaggagaccgaagccctgaaatcggatgaaattgatatgatctttcatttcagtcagaatccggacacagcagaggaataccatttcgcttttaccaatacagcctggacctataatctgatggctgtcaccaataagacatctttcaatgagaatgaatcaaaccgtattgcagttccaaaggatgatctgccgttgaaagagcatattgagtattactatcctcagtgggatgtcgtagagtgcgattctgtggatgatgcggcaaatcttgtgataaagaagcaggcagacggatttgtcacaggagttgcgtctgcattggattacagtgaaaaatacaatttatacagtctgcctctttccaaccctgagaagtcggcttttgcagtaaaaagcggcgaccattacctgctgtccatactgaataagaccattaaagccatgccttccaatatgcttacaagtgctatcgccatgtatgagagtacaccggggaaggtcactctggcaaaatttgtaaaggataatctggctgtggttttactgtgcagtgcagtggttattatgctgattctgatatccatcctgggcttgttgaaaaaagcgcgtcaggctgaggctgctgcaaaacaggctgcagatgaaacacaacaactgaacaaaaagctgcagattgctgtagaaaaggcagagagtgcgaacctggcaaagaccaatttcctgaataatatgtctcatgatatccgtacacctatgaatgtgatcctgggatacaaccggatgcttggaaagagactgacagatcccaaacttctggattatcagaaaaagatagagcagtcaggaaatatgcttttatcgatcattaacaatgtgcttgacatggcgaggattgagagcggcagggtggaactggatgaggattatataaaagtaagcagcatactgagagaattttatgatgttttcgaagaggaagcacagcggaaagggattacttttttgcatgaggataatgtggtacaccagcatattatctgtgacggcaccaagataagagaaattatgattaatcttctcagcaatgcaattaagtatacaccggacggtggtacagtatctctgataaccacagaacttccatgcagcgaggaaggatatgtaaggattaaaacagaggttacggataccggcattggcatgagcaaagaatatctccctattatctttgagtcctttagccgggaacggaacacaacagccggaaaggtaggcggaaccggactgggaatgtctattgtgaaaaagctggttgatatgatgggcggaaccatcgaagtagaaagtgaatccggaaaaggaagccgttttactgtcatacttcagtacaggattgcagatgcaggatgttatgaaaaaagatcagagcaaaaaacagatgattcagcagaaatccttagaggaaagcatgtgttgcttgcagaggataatgatctgaacgcagagattgcaacagcaattctgatgactgcgggactggtagttgacagagtggaagatggccttcagtgtgtccgcaaaatcgaacagtctccggcaggcacctatgacctgatccttatggatatccagatgccgaacatggatggctacagggcaacagagatgatccgcggactgtcagataaaaacaaagccactattccaatcatagccatgacagccaatgcctttgaggaagacagaaaaaaggcactggcaaaaggaatgaacggacatattgcaaaacctgttgatgcagaaaaagttgagaagactatttgttcggttttaggcagccagagtgaacagtaacgcgacacgttaaagtacagaacaggtattcgcttgctctgtactttttttatatgggatgatatactgaaaatataaccatattaaacatatttcaatttttgataagtgaaatttgattaaaacaggagaatattatggatcattttgaattgcattccgagtacaagccaactggagatcagcctcaggcaattgaacgtctggtcagaggctttaaagaaggcaaccagttcgaaactttactgggtgtcaccggttccggcaagacatttaccatggcgaacgtcatcgcccagctaaacaaaccaactctcatcctcgcccacaacaaaactctcgcggcgcagctttacggtgagatgaaagaattcttccctgagaacgcagtggaatattttgtctcctattatgactactatcagccggaggcttatgtcccgtcttcagacacctatattgccaaagactcctccatcaatgacgagattgacaaactccgtctctctgccacagccgcaatgtcagagcggaaagacgtagtggtcatttcctccgtttcctgtatctacggactgggttcccctcaggaattctttgacatgatgatttccctgcgtccgggaatgaccaaagacagggatgaggtaatccgggagctgatcgacattcagtacaccagaaatgagatggacttccaccgaagcaccttccgtgtccgtggagataccctggaaatttttcctgccaacagctccgatacagccgtgagagtagaatttttcggagatgagatcgaccgtatttcagaaattgatgtactgacaggagaaatcaaatgccagcgttctcatatcagtatcttccctgcatcccactatgtagtgccagcagaacagatccagagagcagctgtagcaatagaagaagaattaaaagaacgtgtagagtatttcaaaagcgaagacaagcttctggaagcccagcgaatctcagaacgcaccaatttcgacattgaaatgatgaaagaaaccggattctgttcaggaatcgaaaattattccagacatctgtcaggattaaagcccggacagccgccatacacactgctggactattttggagatgacttcttacttattatagatgaatctcatatcacagtacctcaggtaggaggaatgtacgccggtgaccagagcaggaagcagacactggtggactatggtttccgtcttccttcggcaaaggacaaccgtcctttaagcttcgaagaattcgaatccaaactggatcaggtcatgtttgtatctgccactccgggacaatatgagtatgatcatgaactcctccgtgcagaacagatcattcgtccaaccggacttctggatccgaaagtagaagtccgtcccattgaaggacagattgacgacctgatcggagaagtaaacaaagaagtgtcaaagaaacacaaaatcctgattaccaccctcaccaaacgaatggcagaagacctgacagaatatatgaaagaagtaggaatcagagtccgttacctccattccgatatcgataccttagagcgtgcccgcatcatccgggatatgcgtctggatgtctttgatgtactggtaggaatcaacctccttcgagaaggcctggacatcccggaaatcaccctggtagcaatcctggatgcagacaaagaaggcttcctccgttccgaaacctctctcatccagaccatcggacgagctgcccgaaacagtgaaggccatgtaatcatgtacgcagacaacatgaccgattccatgcacaaagccatcaccgaaaccaaccgccgccgaaccatccaggaagcctataacaaagaacacggaatcactccgactactatcaaaaaagcagtccgcgacctcatcgccgtatccaaagcagtagccgaaaccgaagtccgactccagaaagacccagagtccatgacccgcaaagaacttaccaaacttatcacccaggtagaaaaacaaatgcgcgccgcagccgcagacctcaactttgaacaggccgccgaactacgtgataaaatgatcgacctgaaaaagaaccttgacgctcttgataaatagaacaaatgacctgaaacaagaaaatactaattgcggtcaagcctgcgagaagaaaagaatgacctaaaacaggaaaataataattgcggtcaagcctacgagaagaaaagaatgacctgaaacagaaaaagaacaattacagtcaaatctgtgagagaaaaagaatgatctgaaacaggaaaataataattgcggtcaagcctgcgagaagaaaagaatgacctgaaacaagaaaatgataattacggtcaaggctataagaagaaaagaatgacctgaaacaagaaaataacaattgcagtcaagcctatgagaagaaaagaatgacctgaaataggaaaagaaaaattacagtcaaggccagggcaggaaaagaatgacctgaaacaggaaaaatatttttatggtcaattccagaacaggttacaagtaatatgagataaaaaatgatgttacagtcaatttctcacagcattcttttcatcaaatcaaataaataatattgttatgaaataacaaaaaattcacaaaataatattgacaaaccaaatcaagagtgctatcttatgagcataaggtgttagcactcctaaaacatgagtgctaacaaaccaaaaacaaaggcagtaaaggagtggaacttcatggatcaggaattagatgatcgtaaaaagaaaatactaaaagccatcatcaaaacctacatggaaacaggcgaaccggtgggttcccggaccatttccaagtttgcagatttaaatgtaagctctgccaccatccggaatgagatgtcagacctgacagatatgggatatatcgtacagccccacacctcagccggaagaattccttctgataaaggttatcgcctctacgtagacgagctgatgaaagaaaaggaatcagaggttcaggaaatcaaggatctcatgatagagaaaactgacaaactggataaaatgctgaagcaggtagcgaaggtacttgcctccaataccaactatgcaacaatgatctctgttccacagtacagcggaagcaagattaaattcatccagctttcccgtgtgacaccccttcagcttgtggcagtagtagtgagtgataacaatgtcatccgaaaccagatcatcaatctggatgaggagatggacgatcagacaatcctgaaattaaatcttcttcttaacaccaacttaaatggggtgcccattcaggatatcaacctgggaatgattgcccgcctgaaagaacaggcaggtgtacatggctctgtggttggcacagtccttgatgcagtggcagacaccatccaggtagacgaagacgatatgcagatatatacttcaggagcaaccaacattttcaagtatccggagcttgcagacacaagcaaagcgagcgagctgatttcagcatttgaagagaagcaggatctggtagacctggtgaaagagagaatgtctgatacagagaacacaggaattcaggtgtacattggtgatgagatgccggtgcagaccatgaaagactgcagtgtagtcacagccacttacgaacttggaaaaggaatgcatggtaccatcggtatcatcggtcccaagcgtatggattatgcaaacgtagttgacagcctgaaggctttgaaagtccagctggacgaactgattaagaaagagagttagaaaggcggtaatagagagtgtcagaagaaacaaagaacacagctcaggaagaagagacaacagatactccggtaacagaagaaactgttgagaatgaacctgaagttgtagagaacggcgaagcagaaacagaggaaatcccggtagaggacggagacgaggaagcttcccaggatgacaagaaagacagcaaatcaaaaacttctttcttcggcaagaagaaaaaagaaaaagataaatttgaacagcagattgaagaacttacagacaggctgaaacgaaacatggctgaattcgataacttccgtaagagaacggagaaagagaaatccagcatgtatatcatcggagccaaggacatagttgagaaaatgcttccggttgtggataacttcgagagaggtcttgcacaggcacctgaaggagattcttttgcagatggcatgaagatgatctataaacagctgatcaccacattagatgagctgggcgtgaaaccgattgaagcagtgggtaaggaatttgatccgaacttccacaacgcagtaatgcatgtggaggatgaagaagctggtgagaatattgtggtagaagaattccagaagggttacacctacaaggatttcgtagtccgccacagtatggtaaaagtagccaactaatttacatgaaaatatagaatatatcaaatctagttgaaaataaacaggaggaacaagattatgggaaaaatcattggtattgacttaggtacaacaaacagctgtgtagccgtaatggaaggcggacagccaacagttatcgctaatacagaaggcgcaagaacaacaccatcagttgtcgctttcacaaaaacaggagaacgtcttgtaggtgaacctgcaaaacgtcaggcagtaacaaacgcagagagaacaatctcttccattaaaagagagatgggtactgactatcgtgtaacaatcgacgacaagaaatattccccacaggaaatttccgctatgattcttcagaaactgaaaaaagatgcagaaggataccttggtgagaaagttacagaagcagttatcacagttcctgcatatttcaatgatgctcagcgtcaggcaacaaaagatgccggtaaaatcgcaggtcttgatgtaaaacgtatcatcaacgagccaacagcagcagctcttgcatatggccttgacaatgaaaaagaacagaagatcatggtatacgatttaggtggcggtacattcgatgtatctgtaatcgaaatcggtgacggcgttatcgaagtactttccacagcaggtaacaaccgtcttggtggtgatgacttcgaccagaaagttacagattacatgcttgcagagtttaagaaagcagaaggcgtagacttaagcaatgataagatggcacttcagagattaaaagaagctgcagagaaagcaaagaaagagctttcttccgcaacaactacaaacatcaatctgccattcatcacagctacagcagaaggcccgaaacacttcgatatgaaccttacaagagctaaattcgatgaattaacacatgacttagtagaaatgacagcagaaccggtacgtcgtgcactttcagatgcaggtatcacagcatctgaacttggccaggtacttctggttggtggatcttcccgtatcccggctgttcaggataaagtaagacagttaacaggcaaagagccaagcaagaacctgaacccggatgagtgtgtagcacttggtgcttctatccagggtggtaaacttgcaggtgatgcaggtgcaggtgatatccttcttctggatgttactccactgtcactgtccatcgagacaatgggtggtattgcaacaagactgattgagagaaatactacaattcctacaagaaagagccagattttctcaacagcagcagacaaccagacagcagtagatatcaacgttgtacagggtgagcgtcagtttgcaaaagacaacaaatcccttggtcagttccgtctggacggaatcccgccagcacgtcgtggtgttccgcagattgaagttacatttgatatcgatgcaaacggtatcgtaaatgtatctgctaaggatcttggaacaggtaaagaacagcacatcacaatcacagctggttctaacatgtctgattccgatatcgacaaggcagtaaaagaagctgctgagtttgaagcacaggataagaaacgtaaagaagcaatcgatacaagaaacaatgctgattccatggtattccaggttgagaatgcactgaaagaagccggagacaagatcgatgctaatgataaagctgctgtagaagcagacctgaacgcactgaaagatttactgtctcagactgcaaatgcagaagagatgacagattctcaggtagcagatatcaaagctgctcaggagaagatgatggaaagtgctcagaagcttttcgctaaaatgtatgagcagacacagcaggcaggcggccaggcaggaccggacatgaatatgggcggcggtgcagcaggcagcacagatgcaggaaacaacgatgatgttgtagatgctgattacaaagaagtataatgtgacatttctgtaaaagcagagatttgcaacggaaatatcaataataactgttcagtgggagagtctctctcactgaatagttgtgttataaataaaacgggtataggattaaaatcatggctgataagagagattattatgaagtcttaggcgtggacaaaagcgccgatgacgcaacacttaaaaaagcatatcgtaagctggccaagaagtatcacccggatgtaaatccaggagataaagaggctgaggcgaaatttaaagaggcaacagaggcttacaccatcttaagcgatccggagaagagaaaacagtatgaccagtttggccatgcggcttttgaaaacggtggcggaggtgccggcggcggcttcggaggttttgattttaacggtgctgatatgggtgatatcttcggcgatattttcggcgatttatttggcggcggcagcagaagcagacgtgccaataatggtccgatgaagggagctaatctccgcgcacgcgtaaatattacttttgaagaagctgtctttggctgtgagaaggaactggagatcgtactgaaagacgagtgcaccacctgtcatggaacaggtgcgaagccgggtacttcaccggtaacctgtccgaaatgtcatggagaaggtcaggttgtttatacacagcagtccatgtttggaatggtgcgtaatgtacagacttgtccggattgtcatggatcaggtaagatcatcaaggataaatgtacttcctgccgcggaaccggatatacatcttcaagaaagaagattcaggtatctgtacctgcaggtattgacaatggtcagagcatccgcatccgtgagaagggtgaaccgggtacaaacggaggcccgagaggcgatctgcttgtagaagtaaatgttgcacgtcatccgatcttccagagacaggatatgaatatcttctctactgcgcctcttacatacgcgcaggcagcactgggcggtactgtacgtatcaacacagtggatggagaggttgaatatgaagtgaaacccggaactcagacagacacaaggatccgtctgaagggaaaaggtgtaccgtctctgagaaataagaatgtacgtggcgatcattatgtgactttcgttgtgcaggttcctacaaacctcaacgaagaagcaaaagaagcactgcgcaaattcgatgaggcgtgtggtaaccgtccgaaatcaaaagattctgatgattttgaaaaaccggaaaagaagaaaaagagtttcatggataaattaaaagagacttttgaggattaattataaaagaaaattaaagaaaagaggtttaccctcttttctttttttgtatagtcgtgtatattgaagagtaacggtaaaaatcagatgaacagacaggaataaaagtttcctgagaaatggagagatatttgacaaaaacagagaagatcgcagcttttcgggagaagtatctccctgtatgggtaattttgccgctgataagcatttttgtattaaactgtcttatttactggggaagcggagtactgacagcagacagatatcattttgattttaccatgtcactggacagggcagtgccgttaataccacagtttatctggatttatattctggcatttcctttttgggctgtgaattatattctggctgcacagagaggaaaagatggattttatcggtttgtggcaactgatctgactgttcatattacatgttttattatttttctggttttgccaactaccaatgtcagacctgagattgcaggaactacatggtcccagcagatgcttaagtttgtttatctcatggatggtggaaacagtccgtctaacttatttccgtcaatccattgttatgtaagctggctgagctggcgcggagtcagtaaatcagagaatattccaaaatggtatcagcatttttcactgacttttgcaatactgatcattatttctacccaggtgcttaaacagcattatctggtggatgccattgccggagttgcactggtagaactggcgtggagattttacagcaaaggaaaccgccacgagatattcagacatttttttgaaaaaataagtgaagcatgcagtcggtgggtaaataagaattgactggatgtggtgagatgctgcattatgggaatagctgcagagtaacagagaatgggccagacatatttttggatgataatagttaattatataacataaagaaatggagacaattacatgaagtggaaccgttttacagtaaaaacgaaaacagaagcagaagatatcgttatcagcacacttgcagaagtcggcattgaaggcgtggaaattcaggacaaacagcctctgactgaggaagacaaggctcagatgtttgtagatattatgccggaaggacctgcagatgacggcgttgcctatctgaatttttatctggaagaagatgcagacaaagaagcaatcctgaaagatgttcgtgaagcattagatgacctgaagaattttatggacatcggggaagctaccattgaagaatctcagacagaggacaaggactggattaataactggaaacagtatttccaccagttctatgtagatgatatccttatcgtaccgtcatgggaagaagtaaaagcagaggataaagacaagatgatcctccacattgatccgggtacagccttcggtacaggtatgcatgagactactcagcttgtgattcgccagttaaagaaatatgtaacaccggatacagagatgcttgacgtaggaaccggaagcggtatccttggtatcgttgccctgaaacttggtgcgaaacatgtactgggaacagaccttgatccatgtgcagttcctgcagttgcagagaataaagaagcaaaccagatcgtggatgaaacttttgatatggtgatcggaaacatcattgacgataaagcgattcaggatcaggcaggatatgaaaaatatgatatcgtaacagcaaatatccttgcagatgttctgatccctctgacaccggtaattgtaaaccagatgaaaaaaggcgcttactacattacttccggtattcttgatgtgaaagaagaagttgtagtggaggcagtaaaagcagcaggcctgacggtcgtagaagtgacacatcagggcgagtgggtttccgtaacagcaagaaaggactgatcctatgcagcgtttttttgtggagccttatcagattgaggaagaggcacaccgtatccacatcaatgggacggatgtaaatcatattaaaaacgttctccgcatgaaatgtggggaggatgtgtggatcagtgacgggggagataaagaataccactgccagattgaagaactgggagaggatgaggttctgctgcatatcctctatgcacaggagccgaaatatgagctgccaaataaaatttatcttttccagggactgccgaaagcagacaagatggaactgatcatccagaaagcagtagagttgggagctttttctataatcccggtagagacaaagcgatgtgtggtgaaactggatgttaagaaggcagcaaagaaggtggttcgctggcagcagatcgcagagagtgcagcaaagcagtccaagcgaatgctgatcccggaaatccatgaagtaatgacctacaaacaggcactggaatttgcgaaacagttagatgtaaaactgatcccgtacgaacttgccaaaggaatgaaagaaaccagagaaatcctcagcgagattaagcctggacagtctgtcggtatctttatcggaccggagggtggattcgaggaagaagaggtagcaaaggcactggaagcaggtgcccatgcgattacacttggaagacgaatcctcagaactgagacagcaggacttgcgattctttcagttctgatgttccagttggaaaatgaataatagaaacaagagagaacaaaaatggaagcatattttgataattcagccacgacccgctgctttgaagaagtaaaggacatcgtggtaaaaacaatgatggaagatttcggaaacccatctgccatgcatcagaaaggtgtagacgcagaagggtatgtcaaagaatctgccagaactttggcacagatactgaaagtaacagaaaaagaaatcctgttcacttccggcggaacagagtcaaacaacctggctctgatcggtggtgcgcttgccaacaaacgaagcggtaatcacattatcacaactgcagtagagcatgctgcagtcagccagccggtagcttttctgcaggaacagggatttgaagtgaccattcttcctgtagacgggcatggagtagtaaaacttgacgcattggagaaagcattaaggccggataccattctcgtatctacaatgatggtaaataatgagaccggtgcggttatgcctgtagagaaaatcggtgcaatgatccaggagaagtgtccgaaggcgctgtatcatgtagatgcgatccaggcattcggtaaatatcgtatttatccgaagaaatggaatatccatcttctgtccgtcagctcacataagatccatggaccaaaaggagttggattcctgtacatcaacagcaaggcaaaagtacagcctctcattctcggcggcggccagcagaacggcatgcgttccggaacagacaacgtaccgggaatcgcaggacttggcgttgcagcaaagatgatgtaccagaactttgacgagaaagtagagcatctttaccagctcaaagagcgcatggcagaaggactttctaagattgacgatgtagtaatcaacggaatgcctgtcagagaaggcgcaccgcatatcttaagcgtcagctttctgggaatcagaagcgaggtattgcttcataccttagaggacagaaacatttacgtatcagcaggaagcgcatgctccagccataagagaaaaccaagcgcaacactttccgcaatgggaatgagcaatgcacagatcgagaacactgtacgtatcagcttctcagaggagaatacattcgaagaagttgactactgcctggaagttctgaatgaagtactgccgatgctgaaacgctatgcacgcagataacaaataatagttataagtgatatttggaatggaacctgagataagctcaggaatatttgaaaaggttgttaatagcatttatatgaattctatttgaaaattacagatattaaatccagaaaaatattaattctaatattatataaaacaatttattataagcaaaataagagaaggagaaacaaatgatattccacgcatttttaataaaatacgcagaaatcgccatcaagggcaagaacagatacatcttcgaagatgcccttgtaaagcagatgaacatcgccctttccaaagtagaaggtgagtttgaagtaaagaaagaacagggaagaatctatgtattctgcccggagcagtatgactatgatgaaactgtagaagccttgcagcatgtattcggtattgttggaatctgccctgtagtgatctacgaagatcagggattcgagcagatggcaaaggacgtagtttcctacatgaagaactgccatccgaactacgacggaagtttcaaagtatatacaagaagagcaaagaaatcttatccgatcacatccatggaagttagtgcagaactcggcggtcgtatcctggatgagtttccggatgcaagcgtagatgtacatgaaccggacctgactctttccgtagaaatccgagacaagatctatgtatattcccagactatcaaaggcgcaggcggaatgccaatcggcacaaacggaaaagctatgcttctcctttctggcggaatcgacagcccggtagcaggttacatgatcgcaaaacgtggtgttaagattgacgctgtatatttccacgctccgccatacaccagcgagagagcaaaacagaaagttgtagatctggcaaaacaggtagcaaaatacagtggaccaatccgccttcatgtagtgaacttcacagatatccagctctatatttacgaccagtgtccgcacgatgagctgactatcattatgcgtcgttacatgatgcgtattgcagagcatttcgcaaaagaaagcagatgtctcggtctgatcactggagaaagcatcggtcaggttgccagccagaccctgcagagccttgcagcaacaaacgaagtctgcacactccctgtataccgtccggttatcggattcgacaaacaggaaatcgtagaaagatcctgggaaatcggaacctatgaaacatccattcagccattcgaagactgttgtactattttcgtggcaaaacatccggttaccaaaccaaacctgaacgtgatccaccgttctgaaacaaaattggaagaaaaaattgacgaactcatgaagacagcgctggagactgttgagattattgagattgattaatatcgattacaaacattcggaatctgctgacgctactttcttatgtttgaacttgaaactctggtatacaaaaaaagaggaactggtaaacagttcctcaatgactgcgaaaaaattattctgtaacgtatttgcctacgattgccataacggtatcaagagcagcgccatcagcgtggacgtttaaatcgattggtttggataaatcaaggctgaaaatacccatgatagattttgcgtcgattacatatcttccggatactaaatcgaaatcgcagtcgaatttgctgatttcattaacgaacgctttcactttatcgatagagttcagtgaaattttaactgttttcattatgagaacctcccttaataatagttatttgctgacctgattgtctgtcagcttacagttttcatcttaacggcagagaccataaaagtcaaggtgaaaacggataaaatttccagaaagatttagtgaaaatgtagaacagtgctaaaatatcagactgttttgtagaaaatgaacaataactaaagcgaaaacaaaatctattctgtaagcagataagttttcgaaatgtcagcatgtatacaaagtccagactacagaaaatgagtatgcaagtatagaatttaaaaacagaaaaatcaattaggaggaaagaatgggaaaaaaagttgcacttcacaacttaggatgtaaagtaaacgcctatgaagtagaagccatgcagcagcttctggaagaagcgggctacgagatcgtaccttttgaaccgggggctgatgtatatttaattaatacctgtacagtaaccaacattgcagaccgtaaatccagacagatgctgcacaaagcaaagaaaatgaacccggatgctatcgtgatcgcagccggatgttatgtacagacagatgaagggaaactggataaagatgaggctgtagacctgatccttggaaacaatcagaagggaaatattgtccaggtactcgaggaatatgagcaacagcacaccaaacagaaacatgtgctcaagatcaaccagacaaaagaatatgaagaactggcaattgatcatacagcagagcatgtacgcgcatatatcaaagttcaggacggctgtaatcaattctgtacttactgtatcattccttatgcaagaggtcgtgtcagaagccgcaagatcgcgcatgtaatggatgaggttcatgcacttgcagcaaaaggatacaaggaagttgttctgacaggaattcatttaagctcttatggtgtagatttcccggcagaagagaaagaaacactgctttccctgatccgggcagtacatgaggtagaaggaatcgaacgaatccgtctgggctccctggaaccgggaatcatcacagaagaatttgtgcagagcattgccgcattgccgaaaatgtgtccgcatttccatctgtccctgcagagcggatgtgataccacactggagcgaatgaatcgcagatacagaagcgcagaatatgcagagaaatgcgggcttctgagaaaatatctgggaaatcctgcacttaccacagatgtgatcgttggttttccgatggaaacagaagaagattttcaggattcctatgatttcgtagagagcattcatttttatgaaactcatattttcaaatattcccgccgccatggaacaaaggctgcagccatgtccggacagctcactgaagcacagaaagcggtcagaagtgacaagatgcttgctttaaatgaacagcatgcgaaagaatatgagaaatccatgctcggcggtaaactgaaagtacttcttgaggaagaagtagagattaacggagagcagtggtatatcggccacagtatggaatatattaaaacagcagtgaaaaaacaggacaactacagtgtgaatgacatcattactgtaaaagctgaagaattcctggaagaacatacattaacaggtgaggttctgggagtagaatagttacagttcacttcattctcagcggaatagtggtgtgtgagttactgttcacacaccactatcccgcgaggtgttttggcatgaatatgccaaaatcccgagacatacaagccaaaattccattgccgcaggcaatctggaatgaattttggctatgttactgagaacggagtgaacagtaacgtgtgtgaacagtaacgaataatcatcaataaatttgcggttgcacaatacgtgaaattatattaaaatatagaagaaaatatgtgtattgtatacgaaatttgcaatacatagcaaagcagaattactaagaaggctttgcgacaataaatcaggtaaggacgtgaataaaatggcagagaacaatctgggtaatacccaatatttcagaacaaaaccagaccaggagcttcaggtaaaagaagttctggatctcgtttacacagcaatggatgagaaaggatacaatccggtcaatcagatcgttggatatattatgtccggagatcctacttatattaccagtcacaagggcgcaagaagcatgatcatgaaggtagagcgcgacgaactggtagaggaacttttaaacgagtatattaagaacaaatcctgggaacgctgatatgaggattctgggattagattatggatcaaaaacagtcggtgtagccatcagtgatccgctggggatcaccgctcagggtgtagagacgatctggcgtaaacaggagaaccacctgcgccagacacttgcccgtattgaagaacttgtttcggaatatcacgtggagaagatcgtgcttggatatccgaagaacatgaacaatacgattggagaacgtgcccaaaaatcactggaatttaaagaaatgctggagacacgtacaggtcttgaagtgatcatgtgggacgagcgtctgacaacagtagaagccaatcgtactttaatggaagccagtgtgcgcagagagaaccgcaagcagtatctggatcagctggctgctgtttttattttgcagggatatctggattccctgtcctgttaggagattaataagatggagaaaattaaatttcagcttgaggacggaacagaagcggagttttatgtagaggagcagaccaggatcggaggagttgcatatcttctggtatctgattctctggatgatgaggcgacggcctatatttttaaagatgtgtcagaggatgacagtcaggaagcctgctatgaaatggtcgaggacgaggatgagatgcaggctgtttttaaagtatttgaacaaatgttagatgacgtagaccttgaaatgtagcatggaggtgtagtacttgagtaacgaaaataacaaccagtttaataatgaagcgcgtgaaaatcatgacggacagttcggacatggtcagaagaggccatacaacagaccgaagaattataaatataaaccacagcacagaaactcttatggaagaaaaccaatgcaggaccgcaaggctccggcagataaagagaagaacggaatacaggtaccatttaaggctgcgataaagaattcttcccgcagaccgaagaaaccaacatctaaattaaagatcattcctctgggtggtctggaacagattggaatgaatatcacagcatttgaatatgaagacagcattgttgtggtagactgcggtcttgctttcccggaagatgatatgctcggaattgaccttgtcattccggacgtcacctatttaaaagagaatatttccaaagtaaaaggctttgtgatcactcatggacatgaggaccatatcggtgcgctgccgtatgtactcaaagatgtaaatgtccctgtttattccacgaagctgaccattgcccttattgcaaataagctgaaagagcataatatgaccaatactaccaagttaaaggaagtaaggcatggacaggtcattaatcttggtgatttttcaattgaatttatcaagacaaaccatagtatccaggatgcatctgcacttgcaatctattctccggcaggcatcgtagtgcataccggcgactttaaagtagattatactcctgtattcggagatgccattgatctgcagcgttttgcagagattggaagaaagggagtactggcactgatgtgtgacagtactaatgcagagagaaccggatttaccatgtctgaacgttctgtgggacatgtgtttgataatcttttcaatgaatataagacaaacagaatcattattgccacttttgcatccaatgtagaccgcgtacagcagatcattaacacagcttatcgtttcggacgcaaggttgcagtagagggccgcagtatggtaaatgttatcacaactgcagcagagcttggataccttcgcattccggatcagactctgattgagatcgatcaggttaagaattacccggatgaacaggtagtgctgatcacaacaggaagtcagggtgaatccatggcagctctttcccgtatggctgcaaatatccataagaaaatagtgatcaaaccgaatgatactattattttcagttccaatccgattccgggaaatgagaaagcggtatccaaggttatcaatgagctttccatgaagggtgcgaaggttattttccaggatgtccatgtttccggacatgcctgccaggaagaaatcaagctgatctattctctggtaaaaccgaaatatgcaatccctgttcatggtgaatacagacatctgaccgcacagaaaaatgtagttgaggaacttggaatccccaaagagaatatctttgtccttgcatccggaaatattctggagcttgacagccagagtgcacaagtaacaggcactgtacacacaggagcaatcctggtagacggacttggtgtaggagatgtaggaaatatcgttcttcgtgaccgtcagcatcttgcagaagatggaattatgatcgttgtggttacgttggaacgccacagcaatgtgattcttgcaggaccggacattgtttccagaggcttcgtatatgtgagggaatctgaggatctgatggatggtgcaagagaagtggtagagaatgcactggattcctgtctggaacgtaatattacggactggggcaagattaagacagttgtgaaggatgcgctcagtgaatttttatggaaacgtaccaagagaagtcctatgatcctgcctattatcatggaggcataaaatggaaccaaatacaatagaggaaagtattaaagggcttctggaggctataaaggagagccctgaatatctggaatttcagaagcagagtgatatcctgaaaaagaagcccgaactgaaggcacgtgtggatacattcagggcagataattataaagtccagaatgaatgtgattccgataatctgtttgaagttgtagagcagatgggaaaagaatccgcagagcttcgcagacacccggaagtgaatgcgtatctggatgcggagcttgctttgtgcaaaatgatgcagagaatctgtataaaactgggagaaggtattgatatagatgtcccgggaatgtgagcagataaactgtaaaacagttatcctgctgtgagcagataactgagcggatgactttatccgcctgacatacagaaaggaaatagcttatgagtgataccagggaacgtgcaggtgcagcaggtgttgttgttgcaggaacgttttttaagatcgtactttatatatgtgtgatagttttgcttttctgggtaggaaaggcttcttatcagtttggacatgatgtctttaatcagcaggccatgagtcccggagaaggacaggaagttacagtggtgatcaaggaagatacttccttgtacaagattgccaaaactcttcagaaaaaaggtctggtcaagagtgcaacggtattttatgttcaggagagactgtccacttatcatggaaagcttcaggccggaacgtatctgttaagtacagcatatacacctaatcgtatcatgggaattctggcaggtgatgatgaacaggaaggggtaagtgattcgtgatagttgacgagcggatgcgtacctatattaattcactggatatgggaaatacaccgtttcttgaagaattggagcagtatgccatcagggaacgggtgccgatcatccggagagaaatgcagagctttataaaaatgtttctggctgtaaaccggccgaagcgtattctggaggtggggacagccattggcttctccacacttcttatgtgcgaatatggtcctgaggatcttgaaatcgtaacgatcgagaattatgagaagagaatccccatcgcaaaagagaatttcaggagagccggacgggaagcgcagattactctgcttgagggagacgcaggacagatattaaaagaactggaagattcgtttgacatgatttttatggatgctgcaaagggacagtatatcaactggcttccggatgtgatgcgtcttatgaaaaatggcggtgttctcatctctgacaatgtgcttcaggagggagatatcatagagtcccattatctggtagagcgcagaaacagaaccatatataagagaatgcgtgagtatctgtatgaactgaaacataatccatccctgataacttcgatcattcccttgggagacggagttacagtcagtgtgaaacaggagtgaacaatatgagaaaaatagaattgctggttccggctagcagtcttgaggtgttgaagattgctgttattttcggagcagatgcagtatatatcggtggagaagcctttggacttcgtgccaaagcaaagaacttttcccatgaagatatgaaggaaggaatcgcttttgcccatgaacatggagtgaaagtttatgtgactgtaaatattctggcccataattatgatctgccgggtgtgagagaatatctgacagaactgaaagaactgaagccggatgcactgatcattgcagatccgggaatctatatgtatgcaaaggaaatatgcccggaaatcgaacgccatatcagtacacaggcaaacaatactaactatgagacatatcgtttctggtataatctgggagcaaagcgtgtggtaacagccagagagctttcgcttgcggagattaaagagatcagagagcatattccggaggatatggagattgaaacattcatccatggtgctatgtgcatttcttattccggaagatgtctgctcagtaattatctggcaggacgtgatgccaaccagggagcctgtacccatccctgccgctggaaatattccattgttgaggagaaacgtccgggagaatatatgccggtatttgaaaatgaaagaggaacctatatctttaattccaaggatctctgcatgatcgagcatatggacgatatcattaacagcggaatcgacagtctgaagatagaaggccgtatgaaaaccgctctctatgtcgcaacagttgccagaacttaccgcaaggcaatagacgactatatggagagccctgagaaatatcaggcaaatatgccatggtaccaggaacagatttccaactgtacctacagacagtttacaaccggattcttctatggaaaaccggatgagaatacacagatttatgataataatacttatcagaaggaatatacgtatctgggatttgctgaggcagtggatgaacggggttatgcgcagatcactcagagaaataaattctctgtaggtgagacaattgaaattatgaaaccggacggacagaatgtagctgtcactgtgaagggaatttatgatgaggaaggcaattccatggagagcgcgcctcatgcacagcagaagctgtttatcgacctgggaaccgaaatccaggtttacgatctgttaagaagagcagagtgattaataaacgcagccaacgttaaatttgttggctgcgtttactgcatttgcgggaaaaggcctcgaagcttttgcagagcagttttttcaatcctggagacataagagcggctgatacacagttttcgggcaatttcccgctgagtttcttcctccatgccaaagagcccatatctgcagcagatcacctgatattccttatctgacaggacttttttcagagagcgtagaagatagtcggtattttcgcggatatagcagtcttctacaatatctacaggtgcactctcgatcacatctaacagattaatctcatttccttctttatctgttcctatgggttcatatagggacacttcttttgaatgctttttcttagcacgaaaatacatcagcagttcattttctatacatctggcagcataggtggataaccgggaagccttctggggattaaaggttgtgacagccttgatcagtccgatggttccaatagagatcagatcatctgtatcctcaccggttccctgatattttttgaccacatgtgctaccaaccgcagattatgctcgatcaggatattctttgcctgagaatcaccctcctgatatttttgaagataatatttttcctgggatatggacaaaggtttttgaaaggccttcaaatcgctacctcgaaggggatttctatatagtttatgtccgggacagggtgttggtgcttttccagaaaattttgagcctttttacaattattttacctgttctgtacaattgtgtgatggcagagtgtcttttcctctgctatgcttaataaagctggtgatgaacaaggatatgattttcgatgctgatggacaggctgcgcagaccgaattgaaagatcagagaaaaggagcagtcagatatatgataaaaacctatgtaatagatacaaatgtactgattcaggcaccgtatgcaataaaaaggctttgagccaaagggagtgaaatatttgaaatacaaggaaatagcaaataacaaagaaattaatgcatatctgcagaaaggaaatgcaaatctgggacagctgggttttacagatcattcaaaggcacactgcgtacaggttgcacatcaggctggaaagatactgaaacggctgggatattcagaacatgaaattgaacttgcaaagattgccggctatatgcatgatattggaaatgccattaacagaacccatcatgcagaatatggtgcactgcttgcaaatgatttactgaaagaaacagatatgtctctggaagacaggataactgtaatagcagccatcggtaatcatgacgaatcaacaggaagccctgaggatgtggtttcagcggcacttattattgcagataaaacagatgtaagaagaagccgtgtgcgccagaaagaacaatccgcttacgatatccatgacagggtaaattatgcagttacagacgccaagctgaaaatcgctgaagacaaatctgtcattgcactgaacctacagattgatgaaaaaatctgttccatgtatgattattttgagattttccttgagcgtatgatgctttgcaggaaagctgcggaaatacttggaacaacttttaaactgacagtaaatggccgaaaggttttgtagaattgctataataaaaagaatagagaaatttattggaagagatgcttgaaaaaaaggtatctcttttttggattgctatagttgattttgcagcggatatttcaaatctgcattgagaaatcagaatgactacagtataatggaggaagaatttaaccgaataaactgcagagcagttattcggtgtagaactacgtagcgaagcggatgattttatccgcttgaatacaatacaacaggagaagcacatgaaaatatatttagccccccttgagggaatcacaggatatacatacagaagggcactttaccagtgctttggaggttttgacaagtattttattccttttattcttccaaaccagaaaggacatctcagcaccagagaaaagaaagacattatgcctgagaataatgaggggatgtatgctgttccccagattttgacaaagaatgcagaggattttatccagacagcggaaacactgcaggaatacggttataatgaagtgaatctgaaccttggctgtccgtcaaagactgttgtgacaaaaggcagaggtgcgggatttctggacagaccggatgaactggacaaattcctggatgagattttccgtaaatgtgatatgaagatttccatcaagactcgattgggtatggatgatccggaagaatttgaagatctgctgacgatttataataaatatccactggaagagttaattgttcacgcaagagtgcagaaagactattacaaaaatacgccacgtctggaaacatttggggaggcggtggagcgggccaagagcccggtttgctataacggagatatcgtcacagcaaaggactgtaccagattacaggacatgtttccgaccctggactgcattatgacaggcagaggaacactgaagaatcctgcacttgccagagagatccgtggcggtgcacctgcgtcaaaggaagaaatccgcagatttcatgatatgatgtataatgaatattgtgaagacctgtccggagacagaaatatcctgttccgtatgaaagaattatggtcttatctggcacctatgtttacaaacaataaaaaatatgccaaaaagattaagaaggctgagaaatgtgtggtatatgaaaatgcagtcagagaattatttggctgtgaacagttaattggagaagtggaagatggggatatggaaaaaaatactggattattataacagctgaaagatatagaactcacagtatttcgatagaaagtaactgattagtatctttaaggctgcaatattttttattaagaaggagaaaaaagaatcctatgaaatctcatgtatttcagatgaaatatttcttagcaggcatctatattatctgtgttatatttacctgctttaacgccaggttttatcatacgcctctggcgaagatatcttcagtaacagaaaaggaaacaatgagcagaaaaggaaccagggatgcagaagagtattattatactcagaaaattacagcgcgtatattaaacggtacccataaaggggaagagattgctatttctaatgaatatacatcgtctcaggttcagaatcagaaatatcacaaaggagacacggtccttttaagcggttcaagggaaaatccagggaaatccatacgttccataaagcgtgatggttatctggcattgctggcaggtggtctgttttttcttctgatctgtattacaggaaaacagggattctatacgatcatatcgctgatattgaacacaattatattcgcgtttggatttcaggcttttatgaaaggggaaaatatcttaaatatctgcaatgtaattgcttttctattttcgataacaactctgatctgtctgaatggaatccacagaaaaacatgggcttctgttatttcaaccatatgcgtactgtttctgatcatggcattatttgaattttctattcagttttttggagatctggattattctaatctggaatatctggggagtatgagtaattccgctgatatattctggacagatattatgctgacaggacttggagctatcatggatgtagctgtaactattagtgctgcaacaggggaaattgtccggaaaaatccagatgtttctctgagaaaattaatacattcaggacgggaaatcggatatgacattatgggaaccatgataaatgtgctgctttttgtcctggcaagcggcatgattcctatgtttatcctgaaaatgaacaatgagatcagatttataacgatcatacgatatcatattccatatgatatctgtcgttttcttattgaaagtataggaattgtactggcaatccctgtatctgtttttatttcttctattatcatgaaactaccatctctgaaaaggagcgacaaaaaatgataatttttcttgcactggtgttgattattttaatgattctgattggtggggagcgcggagcagtttctcttatgacactggccggtaatattgtaattctgtttatttcgattcttctgatgtccattggtttcccggctctgcttctgatattggctgcaggggcaggagtctgctataattccctgttctaccagaatggaaacaatccaaagacacgggcggcttttctggctaccttgcttgtgatgctgcttttatttattccgatttatcttattatatggagatcaggaagctacggactgaatgagcttcagctttcagaagatgattttatgtattattacagtacggatatccatattaatatgcttcatgtggcagtttttgtaactgttttcagtactcttggagcggttattgatactgctttatctgtaacttcttctgtatatgaagtctggacacataaaaacagcctgacagcgaaagaacttacttcttccggctatcaggttggaaaagaaattataggaacaactgtaaatacgctgctttttgcttatcttggaggctctattctgttatttgcctatgttcagacacagcaatataacctggaaattattctcaattccaaatttctttttcaggatgttgcaatcatgctgtctggggcgattgcctgcctttttacagtaccggtatcaatcagatgtgtgattcgccagattcatcatgctgcaactgaaacagatcacagctgatcggatttgttttcacagtctttgcagattccatgaagcatatctccgctgcactgcagacggaatccatgattccggaacagatgctcttttaattcatccataaaattacagtcaagatgtacaaccttgccgcatctgatatatttcagatgcaggtggtctgtacatttttttttcttctcctgcgaactgaaacattgctttgtcagaattcagatctgggtatttaattacaacgtgttccgcgcaaagcttatccagatagcggtagacagttgttgagtgctattttgataaacgcaaacagtttgcacttatattaaatggatcagatcgcccactaaaaagattttcaggcacatcggggtgtgcagaaaggactttattatgaaaaaaattatttaccataacagcacttgcagcggcaacagctctcagctttggagcactgaatcttgcatatgcagcagaaacagagaatgcttcttctgacaaaaaaactgaacgttatggccagcttttatcctatgtatgattttgcagtaaaagtaggcggtgattgtctcatgcttatctggcagcattttggtaaaaaagaagtttactacattatatcggccggtctgggtgaggatattattgaaagatcacttggtgatatggatggttttgtagaacatctggaagaatacaggatcgcaggaaagaattaccggactcatataagcttatgggatactcttgaatgaaacaacgctatctttttgcgttccgacaaaagtgccgttgtggcagattgcagcaagatttgaatcatattcatcagtgatttcagaatttttcattattaaatacatatatttataattaagagcgttacaatgccggtaccttgagaacattggaggctgcaattatgagggcttttgatagaaaaaagtcttttaatatatcctgatcaatgatataatattctaaaatgttgacaaatggacatttttactttctaaaatgttgacatacagatatttttgctttctaaaatgttgacaataaaagaaaaatagtaattaaaaatgttacaaagttgttcttgataaaaatattgtttggtaacaggaggtgttttatgttaaaaagaaaagtgacgcattacataaaaaaatgggtagattcaaaaaacaaaaaatgtcttgtaattcagggagccagacaaacaggaaaaacatatatagttgaaagatttgcagaagagaactatgaagaaattgttgaaattaattttaaacagataccttctgcgatggatattttttccggtgatctaacagtagataatatggttatggctatgcggtttcgttttcctgaaaagaagattattccaggaaagactatgatttttctggatgagatccaggagtgtcaggaagcaataacttctcttaagttttgggcattagataatagatttgatgttattgcatcaggatcacttttaggaattgattataaacgtgcttcttcttaccctgttgggtatgttgattatctgaaaatgtatggaatagattttgaggagtttctttggggaatgggaatctctgaggatatgataatgaatctctgtggatatcttggttcaaaagctgctattccagaggcaattcattctcagatgatgaaatattttaggcagtatgtcgctatagggggtatgccggaagcagttcagaagtatatagatacaaaagacttcagggaggttgaccggattcagagaagtctgttacagggatatcagtatgatatagcccattatgctacagctgaagaaaaagtaaaagcggagaagtgctacctttctcttgcgaaacagttattggataaagagaatcataaatttcaatataaagaagttgagcatggaggcagggcacagaagtatttttctagtatcgagtggttacttcgtgcagatatgttgtatttgtgtaaacttgtaacagatataagatttgatctggatgattatgcaagagatgattttttcagagcttatacaacggacttgtctctgttgatggcgatgaaagatttttccttgaagcagcatattatagaaaataccttagcaggaaattccaaaggaggaatatttgaatgtgctgtagcagatgctctttataagaagggatatcagttatatttctataaaaatgagacaacgaaaaaagaaattgatgtaatcattcaaaaagatggaaaagtagttcctattgaggtcaagagtggaaatacacgtgcaaattcactaaagtcgatcatgaaaaataataaagatataagctatggatataaattcatagatgggaatgtaggaaccagcgaagagggaataatcacattaccgctctatatgatcgctttctttgataaagtatcagaataactgtagacaaaaacggaacagacccagaccgaaaaagctcttgcattgatagatacttttgcaactggagatatcgatactgctaaagaattgcttgcaggagattatattcagcacaactttgcctacggtactggaagaattaaagttcaagtgaatcttctgcatttacccacatctgtaaatttccatcaaaatataacagttattaaatgagtaaatcagaatattgttttctttgacttgactatatcgatagcgaggaatgcttcttgccatatagtttttgtatattttctggaagcttgtcaggtaacatggcatttatagcatcttatcatctttcattgctgtttcataataccagcatttggattttaaaagggagagagtttttttgaagttcttggatttcagtttcaacggctgattttcgggcttcaaataattcttttctttttttcatagctggagttgccttcagatacccagataaaaaattgctttatatctttgatcccaagccctgatttcttcaggcattcaataatacgaagcacttccaattcattatcgctgaaataatggatgtttcccttacgttccggattagggaaaaagcctacaatggcctgcaatggaaggatcacaaacgctaaggcagctaaggcgacttatatttgtattagtacattacataaaaatatgcatatacacataaaataggaatgaatattgaaacgtatcttgttttatgatagaatatcattactaaaaaaagtgcagatgcacagaaacggggagagtgatgatggagattaaaagagacgcttacctgcagcagttgattgagcgaaaagataatggaatgataaaggtaatcaccggcattcgtagatgcggaaaatcctttttgctgtttaccatctttaagagatatttactggagaatggcattggctctgatcatattattgaaattgcattggacggtatagagaatgaggaattaagagatcccaagatgtgttttaagtatatcaaggatgctgtgaaagatgatgggaagtattatcttcttctggatgaagtacagttcatgccccgatttgaggaagttctgaacagtttgctacgcatgagcaacattgatgtgtatgtcaccggaagtaattccaggttcctgtccagtgacattgtgaccgagttccgtggcagaggtgatgaaatcagaatctatcctctctcctttgctgagttttattctgtctatgacggtgattatgatgatgcctgggatgactacatgatctacggaggattgccgcaggttgttggtttccagagtgaacgacagaaagcagactatctgaagaacatttttgctaatgtttatctgaaggatgttatagaaagaaataaaattcaaaatgtggatgaaattggtattctggttgatgtgcttgcatctgcaatcggcgcaccgaccaacccttcaaagattgcgaatacctttgccagtcagcgtcagatgacttataccaataaaactatctcaaaccatattgactatttggcagatgcgtttttgatttccaaggcaagccgttacgacattaagggacgaaaatatatcggtgcaaatctgaaatactatttcactgatctgggactgagaaatgctcgcttgaattttagacagcaggagcctactcatatcatggagaacattgtttataacgagctgctgatccgtggctacaatgttgacgtgggcgttgtgcagatctttgataaagataaagagggtaagcgtatccgtaagcagttggaagttgactttgtggttaaccaaggtaatcagaggtactatattcaggttgcatatgacatgacttcggaagaaaagcagactcaggagttcaactctttgcgtaatattccagactctttcaaaaagatggtcattgtaaatggcagcaagaaaccttggagaaatgacgagggatttgtcatcatgggaatgaagtatttccttttgaatgcagatagtttagagttctgacattggttatagataagaaaagaatctttaaaatgctgaaaaattgagagttggagtaaagcttatggaaaacaaacttcaagttttattgattaggaaattgaggagttatgcattttgtaaagagggtctgtaaatgaaaacgtgttgtttagtatgggaaattcctgtaatagagggagaacattataatccaattataaatgtcatttatatgcaaaaagcaaagaaatttttgaatcaactaaatcgatattttcaggatgagaatatggattggaaatgtgttttggaccgttcagcatgtacttataatgagatttttttcagtgaaaatcaagcagttatttttgctccggaagccaaaacaagacaatggttatataaaaaagaaattcaggctgtaagtattccaaaatattatttggattttgcagaatataatgaaggaaagttggataaaatagcaattttctttatgaacttaaaaaataatgtataatagatttccttgttatggagtaatgatatgttttagaggcagaaaaaatcacagggaaaagaaactgaagtaaaaagccgatgtgagactttgggaatcctgcatcggctttactgatcttacagaggttttgaaaatttgatttttactggtttatcaggacttgtccttcaagatatcggtcaggaaacaggatgttaccttttgtagataaaacgattttggtcagattgagaactctttgtttttctgatataattgagaaaaacatatggaaagaacgagagcgttggaatggaaacaggataagaaatatcttgactatatcgatagcgagaaatgcttcttgtccgaaaggcaagaaggtgaggagaaagcaataatgaaaaatcttagattaaaaaaagtatctataaaagatcttgaccagatcagggcactgtactggagacttttggacagctctccgaaatatggtcagattctgcagtggaaaaagaatatatatccaaatgatgacgattggaattcttatattgtaaaaggtgaaatgtacttgattttgaaggatacggatgtgattggtgcagtagcggtgacgaatgcgcagtcaaaagaatatagaaagattcactggaaagttaaggctgatgatcaggatgcagcggtggttcatctgttgatgattttacctgaatatcagggagatggagcggcaacagtagcacttgatgaaatcatcaagctggctgcagacaaaaagaaaaaggcagtgcggctggacgcgatcggaactaatgtgccagcacagaaattgtatgaaaaatacggctttgttaattgcggaacagcacaggagtactatgaaagtaccggagaaacagaattcgtattttacgaatatgtactggtggagtagcagttacatatgaaatgaaaagtatttactaatcggaaattgtcgaactgacacattagaaaggattatatatgagtgagttgattaaggctgataatgaatataagaagctgataatcctacattgggacttttgatttgtaaagatatggataaagtagaaacccagtatgcattagaatctactagccagccactcggtatttccggttatgaattatcaaaacttataccagaagagttcagaggtagtatgcctaccattgaagaaattgaagttgaattaaatgaataacttccagacaaacatttttcaacagagtattgtataatttggatgaagtaatttttatgaggtgattttatgtgtgaaaatgaaaaaaagaaatatcattccattgagatgaccacaggatctctctggaaaaatatacttctcttcagccttcctcttatgggatcacaggtactggaggttctttttaacttaagcgatgttgccgttgttggacggtttgcagattatatggcactaggtgccgtcggctccacaactttgctggttactctgtttaccggaatccttatcggaatgggtgccggtgtcaatgtccgcgtagctcacgaactgggtgccggtaataaaaaaggcacagaagaaacaatccatacttctcttcttttgtgcgcaatcacaggcctgctcgtctgcgccatctgtcttctgttttccgggcggatgctgtccatgatgaacacgaagccggaacttattgatcaggctattttatatatgaagatctattccctgggaatgcctgcaatggccatatacaatttcggaaacggcgtattaagtgccataggcgatacgaaacgaccattgatctacctttccatcgcaggtgtggtcaacgttcttctgaatctgttttttgttattgtctgtcatatggcagccgcaggcgttgcaacagccagcgcaatttctctgtatatctctgcttctctggtgatgatccatctcctcagaagaaccgatgattgcaaagtatctctgcgtaagatctgcctgcaccccaaggcctgcaaagcagttctcatgcttggtatccctacaggtcttcagaacggaatctttgctattgcaaacctgtttgtgcagactggtgtcaactcttttgatgcagtgatggtttccggaaatgcagctgccgcaaatgctgactccctgatctataatgtcatgttttctttttatactgcatgtgcaagctttatcggtcagaactggggtgccggtaataaaaaacgaatgctgaaatcttatagagtcagccttacatatgccttcattttcggtgcaatcctgggtggactactccttgtgtttggcccacagtttctttctctgttcgctacggaaccaacagttattgatgctggtatgcagaggattcgtattatggcattcagctatgcattcagctgttttatggacggcagtatcgccgcatcccgaggtatcggaaaaagtattccgcctaccattatcgttatcctgggctcctgcgtatttcgtattgtctggatttatacagtatttgcacatttccagacgatttcatcactgtatcttttgtatatcttctcatggggaattacaggacttgcagaaactctgttttttgttgtaagttttaacataatatatagcaagaattctccttcctctatagaaggccactgaaaaagtccttttttcgtataaatcaacacaaaataaagtacatcagtcaatattaaggcactatatatagtatgcaaaaacagtttttcagtggcgtcctataggtgggagatgaattgcaaaaaaacagaaaagaacacttgttctgcaacgcgattcatggtataatagaatcagtcgataaggtaaaagatcaaaaaaggactgtttttatggaaaaaatagatcacaatgcacattcagtatatttgatgtattatcatctgatcatggtggtaaaatatcgaagaaaagttatcaatgacccaatttcagaaagagcaaaagaaatatgggaatatattgcaccccgatatggaattgttttggaggaatggaatcatgatattgaccatgtgcatgtaatgtttcgtgcacagcctaaaacggaactcagtaaatttatcaatgcatataaaagtgccagcagcaggctgctgaaaaaagagtatccggaaatccgggaaaaactttggaaagaagcattctggagtcagagtttctgccttttgacggcaggaggcgcaccagttgaagtgatccgtcaatacatcgaaacccagggagagaaaaagcattgaacatagcatatcgtttccggatctatccaacagaagaacagaagatacttctgggaaaaacatttggctgctgccgttttctgtataaccagatgcttaatgacaagatccgggagtataaaaagacgaaaaaactgttaaaaatacaccagccatgtataaaaaggagtattcatttctgaaagaagtagattcgctggcactggcaaatgttcagcttcatctggagaaagcatataagaattttttccgtgatcccaaggttggatttccacgtttcaagtcaaaacatcactccaaaaacagctacacaacaaatgtagtcaacggaaatattctggtagaagataagcggatccggcttcccaaattaaaatggatctccatgaaaaaacacagggagcctgcagaaaactgctgtctgaaatcagtgacagtcagtatggagccgtccggaaagtattttgcaagtctgctgtatgaaggatacagctgcgaaaaccaagcagcagatgaagattacagcaatgccaaaatactggggattgattatgcgatgcaggggatggcagtgttttcagaagagattgaacttgaaaaagcaggattcttcagaagaaatgaaaaaaggctggcaagggagcagcgtaaactgtcgagatgtgtaaaagaaagccgcaattatgtgcggcagaaaaagaaagttgccaggtgccatgaaaaaatacgaaaccagagaaaggattatctgcataaattgagccgcaggattacagaccagtacgatatagtcgcggtagaagatattgatatgaaagcaatgggccagtgcctgcattttggaaaaagtgtacaggataatggatacgggatgttccggaatatgctggattataagcttgcctggaagggaaagaaattagtaaagatagaccgctttttcccttcaagcaaaaaatgcagtaaatgcggaaagataaaaaaagagctgggattatccgaaagagtataccgctgcacgtgtggaaatgagatggacagagatcgaaatgcagcgatcaatatccgtgaagaggcaagaaggatgctggcagtataaactgtccatatccggacaataagtaagaaaatgcgcccgtgtccgggcaaaaagaatcgcggggcacgcgaggatagcttgtagatacttggctcagtagaggagtcattgagcaagaagcccccacttcaaaatctgggatttaagtggtgggagcatgtcacgaaaatatgggttggaaaatagtcacagccactctgtgatttatatgccaggtggattccacaattgactggaaagaaaatcagcttacaaaacgggtgaaatctcaatcggaattgaccgagctgaaagcgagggatacttcttgtccgaggggcaagaaggtggaactaaaaataattagaacaatcggaatttgtaaaggagtgaaattgtcgttatgaaggatatcaaaaccacttgtaaaatcgcattagtacaggcagagcctgttatgttcagcaaaagcgcatcacttaaaaaggcacttcaatatatttgtgaagcagcaagccaaaaaccggatttaattgttttcccggaactgtttattccgggatatcctgttggaatgaatttcggttttagcatgggaaaacgaagcgatgagggacgaaaagactggaaacgatactacgatgcctctgttgttgccggagattcggagttccaacaactcgcagaggcagccaaaaaagcggaggcatacatcagccttggattttccgagcgagacgctgttagtggaacgctctacaacagcaatgtcatttttgaaccgaacgggtcatataaggtacacagaaagttgaagcccacaggctctgagcgtgttgtatggggagatgcgaataaggattatttccctgttactgaaacaccgtggggaccaatcggcagcatgatctgttgggaaagctatatgccgcttgctcgggtagcgctctatcaaaagggaatcaccatttatatttcgccaaacaccaatgacaatccagaatggcaagccactattcagcacattgcaatcgaggggaaatgtttctttgtaaatgctgatatgattatcagacgcagttcgtatccttctgacttgtgtgagcgcaatatcgtatcggaacttccggaatttgtgtgcagaggcggaagctgcatcattgatccgtatggtcattatttgacaaagccggtttgggatgaagaaaccatcatctatgcagagctcgatatgagcctgcctgccgcctgtaagatggagcatgatgcgattggacattatgcacgtccggatatccttgaacttaaagtcaacgaaaaataatagtctgttggctcatcaacttccagtttacagaactgaatcaaaagagctcgaaggagctctttttccttttttataatagtatcattatggtataatagagacattaaaatcgttaaggaaagaatcgaaggtggtgcaaacgaaaaagcagtatggagacttttcattaactgccctttcgtttgcatcaatttcgattttttctggttgaacaaagcgcgtcaactctatatggacttttaattatgacactctatttataataggatagcgtgtacacatagaaacacatagaatttataattcagtcctgtattatgacaccagaaataagcctccctaaggaagctaaaaaaatatacagttatgatacgttaacagagcatatgtggttttggttttataaaatgttgttctgtaggcagaggaataatcttaccaccacaggaagaacacttgcatatatctttattataaagaagacggataatggcaggtgcatccatatctttcagcttggaaatatattttttgcaaccaaggatgtttctgcatagggtaatctttttcttcttatttctggatgaaagaagaccatagtgcctgatacgtacaaaacgttttggaggaacatgcattaaaaatcgacggataaattcctcgccggatatggtgatctctttccaaagcccttggtttttgtaatctttagcggaaaaagtaactgtagattctgtcatgtctttgatacggtagttgctgatagcaatccggtgggtgtattttccaaggtatctgatgacagattcggcaccgtcaaatggtttcttgcaataaggaatccattcctttgtatagcaggtatttaataattccttgaaagtatagtagtttttgtaaggtgcagccggcccatgaaattcaagcctgtcattttcccagagctgcttaagttcagccatatattttccacgaaatattttggagatcaccttaatcggaagaaaaaactctttcccgttgtctttccaatgacttttcacatccagccctccaccaagaacaatcgcatggatatgaggatgaaaattcatggtgcttccccatgtatggaggatacagatatagccgatatcagtcccaagatatttactatcagcagcaagttcactgagagtatctgaagccgcatgataaagagcagtgtataagaatttctggttgctgtagataatgggattaagttcttttggaactgtaaaaactacatggaaataaggagcatctaagatatcctcacgccgtgcatctacccatttttcttttggaaactcctgacacataggacagcatctgtcacggcaggagttatagtggactgacatgcagccgcagtcctcgcatacgcttacattcacaccaaaggcaccggttttgcaattcatgatgtgataagcggtctttcgctgagcgggagaaatactatgtgtggattcaaaagatggataaaaacgatgaaaaacatcctgaatcgtacaatccttactcatgatttaccaccttccgggttgtcgaacgggctgcggattccaagaagtgtcttgttgctcacatgaaggtaaacatctgtagagcgaggatcaacatgtcccagaagtgactggatatattttatatctgtgccactttcgaataggtggctggcaaaactatgacggcacgcatgagaggaaacatgacggttaatgccggcgagtttagcacttttcttaaagaactggttaacactggctatatcaagatatccaccggaccaggaacttgggaaaaggatatctttagggcgaccacatttgtaccaatactctgtgagaaggtctaaatttttttgagacagaattgtatacctgtcaattctgcctttggtttcacgaacatgaattgtcatgttggtacgtgaaatgtcatcataatgaagatgaacaacctctgatacacgtaatccggaagaatacatagttgcaataatcgctttatgcttcagattcggagtggcgtcaatgattgcatttatttcatcgcgggatagaacagcaggaagatttcgctctcttttcatagccggaacagtgtcatcatcccagagaatcttcagcacctttttatataagaacttgattgcagaccgatagtgattgtgagtttcaggagaccttccttccagacgtttggcagtaagaaaactttccgcatcttcaagtgtaagatcagaaacattttttccaatccaacgaaggaagtaactgacatcagagcaatacagttgaatagttctttcacgcaggttacgtttttccgcttcattgcggatggattcaaaaatatctttatacataataaaacctccagaataaatagtgttaataattacatctacctattcggaggtgcgttagcgtcataattccgattgcggaagagactggaaaatgttattcttatcataggcagtggagctttcttagttcagttgtttcgtgtggtaacttaacaataacggattatggaaagtaattccactgcttttttaataaaaataaaactgcgccacagccttggcaggccatcgcgcagcgattttgttcaatcggaatttcaggaggtgtttttatgccacaaatgaataagggaggaaaatttattttcgggaaatcactcattcggacggatggaacattgcggattccaccgcaggcaatggaagaatatcacattgcagatgaaggaaaagtatatctttttaccggaagtaagattaccggtggcttctgcgtcacccggaaaggccttttgcatccgtcaaaacttggtcacattttggacgatactccaccgttgcttgactactcagcaggttctggcgaatttatcaaatacaaggggcgttcctactgctgggtagagatttcacaggaggggcaaattcttcttacgaagaaaatgatggattttttgaaggtgagacccggaatggagctgctctctatccgcagtagcgacatcgcgtttacgatgggagctaaaggaccgctattggaaaaagcagaaaactatgatggtgaaattccgcttttttaagtgtaacaatttgaatttgtggaggataactattgtggataaagcagttatttatatacatggaaaaggtggtaatgctgaagaagctattcattacaaaccgctctttagtaattgtgatgtgattggtctcgactatactgcacagtttccatgggaagcaaaagaagaatttccattactttttaattcaatttatagaaactacaagactgttgaagtaattgccaatagcattggagcgtattttgctatcaatgccttatcaaatcagcaaatagagaaagcatattttatttcgcccgttgtagatatggaaaggcttattgctgatatgatgatttgggcaaatgttacagaggatgaactcaaagagaaaaaagaaattcagacaacctttggagagactctttcatgggattatctttgctatgcaagagaaaatcctattatatgggaaatcccaacgcacattttgtatggtgaaaaagataattttaccgcttatggaacgatatttgaatttgtacagaggactaattcaacactttctattatgaaaaatggagagcattggtttcatacggatgaacaaatgaaatttcttgatgaatggataataaaatcttccaaataaattcaagttttattgattaggaaattggggagttatgcattttgtaaagggggatctataaatgaaaacgtgttgtttggtatgggaaattcctgtaatagagggagaacattataatccaattatgaatgtcatttatatgcaaaaagcaaagaaatttttgaatcaactaaatcgatattttcaggatgagaatatggattggaagtgtgttttagaccgttcagcatgtacttataatgagattttttccagtgaaaatcaagcagttatttttgttccggaagctaaaacaagacaatggttatataaaaaagaaattcaggctgtaagtattccaaaatattatttggattttgcagaatataatgaaggaaagttggataaaatagcaattttttttatgaacttaaaaaatgatatacaatagatttacttgttatggagcaatgatatgttttgaaggtagaaaaaattacagggaaaagaaagaaaccaaagtaaaaagccgatgcgggacttttgaatccagtatcggctttattgatcttacagaggttttgaaaaatttacttttaatggttcatcaatgctttgatatttggggctgtgtggatttttttcgatacagcaggaataacataaacaatagaattactggaaaaataagtccgaatcccatgccgatcctaatattatttccggcattctgggtgatacgaccaacaattccaggtccaatgctgccacctaaatctcctgccatggcaagaagagaaaacatagccgttccacctgttggaaaagtttttgaggaaatactgattgttccaggccacatgattccaactgaaaatccacatgcaatacaaccgataagtccgataatcgggctggatgacaaagcggcaagtagataacagacaacgcataatatgcctgaaccactcataaacttcattaaatctaactgttctccatattttccaaaaattatacggctgattcccattgttactgcaaacatacatggacctgctaaatctcccagggcttttgacaatcccagtgcagcttctgcataagcagatgcccattgagccattgcaagctcagaagctccggaacagatcatcagacatattgcaacccagaaaaatggtctggaaaacagattcttaattcccattccggaaccattgtcaaccagaggttcaataggacaggtcatgaagttataagtattaactgcaggaatgattgcccatattacggcgagccatttccagttgtctattccaaatatcaggaaaaataagctggaaatcaaaattgtcccaacagctccccaacagtaaaaggaatggagcagactcatagttgcttctttgttttcaaatggacaggcctcgataatagggctgcaaagtacttctattaaaccacttccgatggcataaacaataacactacatataattccaataaaaggatcaggtaaaaaatcaggtaaaaatgccagtccaagcagacccagtgcagaaaatatttctgatgtaacaatgcacacacgatatccgatatgatctacgaatttggcacagaacaggtcaaccagaagctgtgtgaaaaagaagaaagtggatatcagagcaatgttaccgagagaaatatggtagtcactgtgaaatttcaaaaaaagaagcggtgcgaagtttgcagcaatagcctgtgtgataaagcccatataacaggcaagttttgtcttatggtagtcagctttttttatagaattccccaatttaaaaatcataagaatacctcttttctttttttgcttgattatatagcaaatattagatatatacattgaattaaattgtagaaatactgtataatatcgtaaaaaagaaagaatgtgatatggagatggattataataaaatatataataagatacttacagacgaggagttcatggaaattaaacagcatggaagtagtgactatccattccagtattattatgataatctggaattgtttgattttcattgtattgagtggcactggcacagagaatttgagtttttatatgtggagtccggagaagttacatgcggaataggagaaaaacagattatattgtcagaaggagaagcaatttttattaattctaaaatattgcaccgcttttacgcaccatcaggtggtatcattcctaactttgtatgtatgccggaatttattgcaccggagaacagcctgatctataagaaatatatcttgccaatcatttcatcgaatatatatttccagcgttttcagactgatgaactatggcagacaaagattatacaaactatgataaaaataatggaaatacagggaaatgagaaaataagagaacttgctactttggcattgatgcaggatttatggctgactttttatgaaaatgtaaagttatctgataaaggagatgtacagacagttgatgaagttgcacagaaaagagtgcagttaatcatgcaatatatacatgaaaactataatcacaatttgtctctggatgaaattgcttcacatataggaatcagcaaaagtactgcacttaatttgttccaccggtttttacatactacaccggttaattatctgataggatatcgacttcaggcagcttcctggttattgaaaaatacgaataaaaaagtaaaaacgatcgcctatgaaagtggatttcataacgttgattatttttgcagattgtttaaaaaacgttatcatttaaccccatcagaatatcgctgcacatgtttaaaattgttgtcggcagatccgagtcttcagacccataaataaagccgatgcgggactttggaatcctgtatcggctttgttaatttgcgaagattttgaaaaatttattttactggttcattagtgctttgatgtcttcttccggtgtggtgataggtgcaataccataattttccaccagatagttcagaatattaggagacaggaacgccggaagagaaggaccaagacggatgttcttgatacccaggtgtaaaagtgtcagcaggatacagactgctttttgttcataccaggagagaacgaaggaaagcggaagctcatttacagaacatccaaatgcatccgcaagtgccacagcaacctggattgcaccataagcatcattacactggcccatatccatcagtcgtggcagaccaccgatttctcccagctcaagatcattgaaacggaattttccacatgccagggtgagaacgatactgtcagaaggtgtctgtttcacgaattccgtataatagtttcgacccggtttggcaccatcacagccggcaaccaggaagaaatggcggatagcgcctgattttactgcttctactacagtatctgcatgggacagaatggctgcatgtccgaaaccggttgtcactttcgtaccgccgttgatgcctgtgcgtgtctgatcttctttgtaaccacccagttccagtgctttttcaataaccggtgtgaaatttttcttctcgtcgatatgaacagcgcctgggaaagcaaccacttctgttgtaaatactctgtcagcataactgctttttggcggcatcagacagttggtggtgtaaaggatcggagccggaagatgatcaaactctttctgctgattctgccatgcagttccgaaatttccttttaagtgagagaatttctttaagagtggataggcatgggcagggagcatttcaccgtgggtatagatgttgattccttttccttctgtctgttcaagtaaaagctgcagatccttcagatcatgaccggttactacaataaatggtcccttttctacggtaagtgtaactgcagtcggttccggtgttccataggttttggtatttgccttgtcaagaagtgccatacatttcagattgatttcccctactttcagtacagtaggaagcagtgtatccatactttcttcataaccaatcttaaataatgcttcgcagaagaaacggtttacttcagcatcttcataattcagaacatttgcatgataagcataggctgccattccgcgaatcccgaaaagaataagggacttcagggagcggatatcttcatctgcattccacagctgttgcatgtcatattcgtctgatttaccgcaaggtgactgacatttactgcagccaggaaccagtctttctttttctgctctgactttttgtatcatattttcgattgctgcatcgtcaaaactcacatttgtaacggtagtaaacagtccttcaattatgatctgactggtacttttggaaatagctgctgcgctatcgacagcccttgccagaccgatcaacgcacctgtcagctcatcctgtaatttggcagtgcctgccttttttccgcagacacctgcatttcctgtgcagccggtgcatcccactgtctgttcacactgataacaaaacatttttttatccattgtcgtatcctcctttattctataatatttccatcgatacctatggttataacctgccagggaatgaattttccactattctgaagtgcttttctggttgccatctcaagtccgccacagcatggaacttccattcttacaatcgtcacactttgaatatcgttattttggattattgcagtcagtttctcgctataatccacctgatccaatttaggacagccgattaatgttaccttatttcggataaaatcctgatgaaagcctgcgtaagcgtaagcagtacaatcggctgcgattaaaagctttgcgccgttaaaatatggggcactgacaggtgccagcttaatctgtaccggccagttctgaagattggatacctgacctgtggttgaagatggttttcctgatttgggtatttctgatcgctgaatctgcatgcttttagacccgggacagccggcatgagcagttattgcctgatttttggcaaatatttttttctgtgcttctttcacagcctcttcatcatattcaggtgcttcccgttcctcaaaggaaatggcacctgtgggacactccgggaggcaatcccccagtccgtcacagaaatgttctctcaccaattctgcttttccattaatgatatcaatggcactttcgtggcaggcatctgcacaggcgccgcagccattgcatttttctttatcgattcgaataatctttcttatcattttacctccgtcaatagatttaacttttgtttctgtcggcattatagtatgataaatacaacttgtatgtttgatttccaacaaggaggaatgattttgaaaaaatatttacccattttaaaaaacagtccattctttacaggccttactgataacgagatattatctatactgcattgtgtaaaagcaacagcagtttcccaaaaacgagattcttatattttcagagcaggagattctactgaggtaatgggacttgtggtgtccggctgtgttcttgttattcaggaagacctttgggggcatcggaatattctgtcgaaatgtcataccggtgatttctttggtgagccatatgcagcaagcccgggtgctgttctgaatgtcagtgtggtggcagatacggattgtgagattatcctgctaaatgtccaaaggcttctgatttcctgcccgactgcatgcgaacaccatcagaagctgatccgcaacctggtcagtgtcctggcaaataagatactaatcctgaacgacaaaatcacacatgtgggaaagcgaacgacaagggataaactattgtcctatctgtcggcagagtctatcagacattcatcgttatcctttgatattccttttgaccggcagcagttggcagattatctgtgcattgaccgcgcggcaatgtctacggagatatcaaagctacagaaagaaggttttataaaaacaaatagaaatcattttgaattgactgtttgtaataattcggattctgaaataaaagtgtgatatccatcatgaaaaattgtgtattacagttatgtcaagtggatattcgcaattgaagcaggggacttacttgattcggttaaactttcgtgtgacaaacgtagctgtctgtgatattataaaagtgatataagcgaaaatgacttttgcagaaacgaaagtatctttaaatgatatttacaaatatacttcctctaatggcttaaagggaagttttatggatacggaacggtatgagtacaaatgagcaggaaacagtaatgtcaatgctgtatggacttcagaagtaggagaacagttcgaacgtatgtatcggctgttctttttttgttttcaggcattaatgcggtagtattttctatataagtgttgggagattatatgaaaaagtttaaggcaaacgataataagagtgaagaacatgagatcaactacagacaattcaacaaaaagctggaactgctgaatcagatcctgtctctgatatcagacatcaatcaggcatcagatgagaaagaagtgaaggactgtattcctgcattgcttcaatacaccggcgaatatacagatgcagacagagtatatatttttgaactgatgtctgaaaaacaggattattacagcaataccttcgaatggtgcagagaggggatcgtcccccagattgacaatctgattcgtatttctgccgatagtatgccggtgtggcatgagaaatttcttcgtggagaaactataattattcatgatctggagaaaatatgtgaaactatgccttcggaatatgacattctgaaggttcaggatattcattctctgctggttttacctttgtttgcaaatacgcagttgagcggttttatcggtctggataatccggatctggttaatcccggtgtttccatatcgcttctttccaatgcaggcggacatcttgccagtacattgaacaatctgcgcatgttcaggatgcttgaggaaaaacagaaaacactggagagcaatctggaggaacttcagaaggagaagcatatcctggaagctctctgcgtagattatacctcattttatttatgtgatctggcaaatgatactctggaaacgatcaaacagagcatactttccaatggtacagagattgatgagatgacggagcagaaatccagttatacctccagaatcagatattattatgatcattacgtaatccgggaatcagcaccggatttcctccggaagatggaacgtcacgctctcatagagtatctgcagaatcacaagcgttttgcgtatcgttatcagtcagtgaaaaaccatgccggacatgagtattttgaattacaggtgatccgcctggagacaggcaacagggatgattataagatcattatgggatttcgctatattgatgatattgtgcaggaggatatgaaaaagaagcagcagatggaagagactatggctgacctgaaactgaataatgagattatctctgcaatcagcaaaatgtaccggatcatttaccggatggatctgatccatgatacctatgaggagatttccagccaggaatccatgcaccgtctgaccggcagaagtggaaagacttctgttcagtttacaaaagccagagaaaaattcatagcccccgaatttcaggaaagaatgagagaatttctggatgtttccactctggcagagcgtctgaagaacagagaggaggtttccacagaatacagagccataaccggagtctggtatcaggcaagatttattgtaaagcttcgaaatgaagcaggggaagtgactaatgttctctatgtgacgagagatattaatgaccagaaaatatctgagctggagagccgggaagaactgagaagaaccgctcaggaggcagagaaagccaatctggcaaagacagatttcctgaggagaatgagccatgatgtccgtacaccgatcaacgggatccagggctgtgtggatattgcggaccgttatccggatgatctggagcttcagcaggaagcacgtaccagaatcaggactgcttccagttatcttttaaatcttgtcaatgatgtgctggatatgaataagctggaatccggcaatatacagcttgagagaaagcactttaatctgctggaacttttgcataatacgaatgaaatcatcaggatgcaggcaaatgaagctggtgttaattattatgtagaagctggagaaatcatccatacacagctgataggaagtccggtacatttccagcagatattgatgaatatcggcagcaatgcagtaaaatataatcatgatggcggttctgtgacagttacctgtcgtgagatttcctatacggataccattgcggaatatgaactgacctgtacagataccgggatcggcatgagtgaggaatttcagaaaagggcatttgagccttttgcccaggaggggcagtcagccagaacaaaatatgcaggtaccggtctgggtcttgccattgccagaaaactgacagaactgcaggaaggaactcttttctttgagagcatacagggaaaaggaaccaaatttattctccatatttcttttgaaatctctgcagaggaaccggaaaagaaatctcatatgtatcagaactgttcagtagaggggattcaggttctgctggtggaagacaatgagctgaatatggaaattgctgagtttctgctgaaagaagaaaaaatgatagtgacaaaggcatggaatggacgggaagccgtagaaatctttgagaattcagagcccggatactttgatgtgattctgatggatctgatgatgccacaaatgggaggtctggaagctacccgcagaatcagaaaaatggatcgagaggatgcggaatctatccccatttttgctatgacagccaatgcctttctggatgatattgcacagagtaaagcagcaggaatgaacgaacatttttcaaaaccccttcaaatggagaaagtgatagataccatacgattttattgcacagcccgatgagaaacagttggaagaaaacataacgaggaaaattcaatgaaaataaatagtacagctgctaaacatattaaaaaatactgctatattataggacttctctctttcctgatcgcattttttgcgtgtagtcagatgctccgatatcaggaaaaggaaaaaaaagcatcgggaacttatatggcacaaagcacgataaggagagtcaaggcaaagctggacaattatataatgatttctgattttctgggaaattatatcattgatggatcggatatggatgaaaacactttttcagaactggcagaaaagattcctaatgaggaaggtgtggtaaaggcgtttgagctggcaccggaaggaatcataaccgaaatctatcctatgcagggaaattcagaggctcttggactggatgttctgagggaacacgaacggaaaaaagatgcagttctggctaaggaaaccggggaatatacacttggcggtccctatcagttaaagcagggaggaaccggagcattactttttaaaccggtttatcgaaccgataatttcggagagagtagtttctggggatttgtactccaggtaattgactgggatcgtttcatgagtgatataaatctgaaatctttaagtgaggcagatttcagttataagatctggtcttatgacagaagcagtggagataaggttattcttgcccagagtcaggatgatatgccggaaaacagcctgacgatagaatgtgagatcccgaataacacatggtattttgatattgcgccttccaatgggtggactccggtttctcaatggattctttccataattgcttcttatatattctcgttgctgatcgctatggttttttatcagatatccagcaaaaaacacagagaaaaacaatatgctgctgagcttgagaaagcggcagaactggcgaaaagtgccaatgaagcaaaaacacgatttctgtttaatatgagccatgatatccggacgccaatgaatgcgatcataggtttttccggattactggaaaagaaccttcaaaacgaggaaaaggcaaaagaatatctgggaaagatctgttcttccggaaatctgctgatgacgattattaaccagatcctggagatagcccgtattgaaagcggcactacagctctgcagctgaaagcagaggatataaacacattatttcatacggtaaacacagtatttgaggaagatgtaaggaagaagaacctgcagtattcggtagatttggatgtatatcatacctttatcctttgtgacagggtgaaacttcaggagataatgctgaacatcatcagcaatgcgataaagtatacgtcagatgggcatggggttcatgtaaagatatatgagaaggattcagaggatccccggaaagcccggctcatttttacctgtgaagatacaggcattggcatgagcgaggaatatcttccacatatctttgaagaattttccagagagcatacaaccacagagaacaaggtcgctggtacaggactgggtcttcctattgtaaaatccatgatcgagttgatgggaggaagtatccgggtagaaagtacgcagggcgccgggacaaaattcactgtagatatttcttttgatacagcatcagaagaggatgtatacaggaatcagatatctgaacagccggatgcattaaagaggatggaaggaaaacgtattcttcttgcagaagataatgatctgaatgcagaaattgcgatagaactgcttgcggaacaaaagattattgcagaccgcgcaatggatggagctgattgtctggataagctggagaaagcagcttccggatattatgatatgattcttatggatattcagatgccggtgatggatggatatgacgctacagccaggatacgcagaatgaaagatgaggagaaagcttccatacccattatagcaatgacagcaaacgcctttgcagaggacagacaaaaggcgatatcgaccggaatgaatgatcatgtggcaaaaccaattgatatgaaggtacttttaccggtgatggcaaaatatatcagatagaataaatccgccgatatgattacacaagttgatcgtatcagcggattttttgtcaaaatctgtggacttatatagtattaaaaactatataaactggtttctcttgacaagaacaaatattatgatatactttgaatatcaaaatatttaaaacacaaacaaaataacaggagaagaatcacaatgaagaatttcaaaataggagataaaatcacaagagttccattgatccaggggggaatgggagttgggatcagtcttggcagacttgcaggttctgttgcgaaagcaggaggagttggtattatttccactgcacagatcggctacagggaagaagatttcgacagaaatccggcagcagccaacgaacgcgccattgccggtgaaatgaaaaaggcccgtgagatttcaggagatggaattataggatacaatattatggttgcactgaaagaatatgcatctcacgtaaaggctgcagtaaaagccggtgcagacatcattatctccggtgcggggcttcccacagagcttccggaactggtaaaaggaagtctgacaaagattgcccctatcgtatctacagaaaaatctgcaaaagtaatcctgaaatactgggacagaaaatacaaaagaactgcagatctggtagtgatcgaaggtcctcaggcaggcggacaccttggctttcataaagaagagctggagaaatatactgaagaatcctacagtgaagaaataaagaaaatcatcacaacagtaaaaagttacgcagagaaatatgggacagaaattccagtgatcgtagcaggtggtatctataacagagaagatgtccaaaaagtggataatctgggtgctgacggcattcaggtagctacccgttttattacaacggaagaatgtgacgcagacatccgctataaagaagctcatttaaaagcaaaagaatccgacattgccattgtaaaaagccctgttggaatgccaggtcgtgccattatgaacaaattcatgacccgtgtcatgaacggcgaacagattccacacagttcctgtcatggatgtcttgtaaaatgcagccccaaagaaataccttactgtattactgacggactgatcaatgcagtaaaagggaatgtagatgagggacttctcttctgtggtgcaaaagcatggaaagcagagcgtttgcagacagtacaggaagtaattaatgacttgttttaatcaatcaagtagcgaagcggattgtgaatatccgtttgactatagaaatgcataatttaaggggtgaacgttttgtaatgttcaccccttattatggatttgtacagtatttaattctgaatttctgccagtgcctttttaaactgaaatgtaaataaaacagaggtaaagatcacagcagtaatatctgcaatgggttctgccatatatacgcctgttgttgaatcagatatcatatgaggcataatatagatcagcgggatcagcagtacaaacttgcggacaacagcaacaataatagagtttactgcctttccaagggaggtaaaggtcatctgacaggcaatctggataccgaagaggaacagaccacccagatagatcttcagcattggtgcagtaaatccaataagatctgtatcagcagtaaaaatacttacaaatactctgggaacaagctgtacagcagcccagagaagtacagaatatgacagacaggtgatcagaagcaaacggaatgttttctttactctgtctgcattttttgcaccgtaattataactggaaattggctgtgctccctgcgcaattccctgaagaggaagcatggcaaactgcataacactggtcaggatggtcatggctcctactgcaatatcaccgccgtaccgaagcagggatgaattgaagcagacagttacaatactttcgcttgactgcatgataaaagcagcaagtcccagcgcgatacagggaagaacgacctttgcctccaggtggagatgctttttcctgaggtgaagcagtgtctttttgccgcagaggaatgaaactacccagagtgtggaaatcgcctgtgagataacagttgccagtgcagcaccgcgtactcccatatgaaaaacaaagataaatacagggtctaaaacaatattgcagacagcaccgatcaggacggaaaccatggaaaatgtggtaaatccctgtgcagtgatgaatgcattcataccaagggttaattgtacgaacaaggtaccgaaagcgtaaatatgcatataatctgttgcataactgatggtgttttcactggcgccaaaagccagtaataaatctctgccccagatcagtaaaatggcagtgaggataacagagataataatctgaagaataaaacagttgcctaatatattctcagcagatttattatcctgttttcccatgtaaatagaagcccttggtgcgccgccggaactgaccagtgccgcaaatgcggagacgatcatgatgatgggcatacagactcccacacctgtaagtgccaggctgccttcccccgggatgtggccgatgtaaatacggtctacaatgttataaagcatgttgatgagctgggcgatcactgttggaatggatagctttaaaagaagctttccaacaggttctgtgcccagaaaatttttgttatcctgcatggatgataacccctttcttaaaaatgtttttgaatgaataatatttaatgatacgatataaagaaaggaaagtcaactcaggatagagaatttgggcaacgttactgtgaacggagtgaacagtaacgaacggagtgaacagtaacagttccgggacatctggcagatacagatacccggaactttttggattaagatgcgttattttagaggattactataaatcaggcagcgaagcgtatagttttatctgcctgatatgtcagaaaatgtccggatgagatcagattgtaattacatacgccctgtttcctctataatagggacgtccgtctacaccgctgaggtcataactcatacggtaatatctttcgatatgtcctgtgccttttgcccagttcggatcgcagacttctcctttgatctcagcccatccatgaccgcctgatgagataaccttggcttcaaatccgactgcgttagccaggtaagcaaatgcagatgcaaaagcgaaacagtcgccatgcccccggtagaacatatcctccgcatagctgacatcccagtttgagtaatagtaacggaaatcgtagtcattgccggtgccaccgtatccgtagctgactgccttcagataacatctccataatttctctggtttggacatatttcttttggtcacacgacgcatgacctggttagctgtgaccataaggttcagttttcttttttcttcactgttatagcgtgcttctccacttttggtaagataaataccatttacacgccgggaagttaccatggaggcataacagccgttgcggatctggaagaaataataatctcccttgatcttctgccagccgttctgctggattcccttttcattaaaataatatttctttccgcggatcgtgacaagtccctttacagtatgtccgttttcatcatagtaataaatgtttccgctgggtttgtggtcaaatttgttacgtttttttgatgctgcggatactgaagctgaaaataaaaaagagcaacagatagcaataagaattgctgagatagaaaatacttttaattttttcatagagcacctccgttctttatgagcagatatttatttctgataaataatgtacaatgaagaaattatctgctctaatcataagatatattttattatataagacaatttaactgtgcgcaatattcaattaaggagaaaaagcgttactgttcacacaccactatcccgcgaggtgttttggcatgaatatgccaaaatcccgagacatacaagccaaaattccattgccgcaggcaatctggaatgaattttggctacgttactgagaacggagtgaacagtaacgaaaaagctgaagagcggattgttgcgcggatgcgttttgtggtgtataattaaacgcaataggcttgtgaacagtagctctgtaatttaagcaaggatataaggtgaacaattttgaaaaagacgatagaagaactattaagtggaaatttcagacatgaacatccgcagctccttttttcgcaggacaaaatagaagtgactctgaaagcaggtgatgtgtacaaaggggaactgtattttggaacagaggataatcagaaaatacgtggatatattacatcttccaacaggcgcgtggtaccgggaaccgagaaattttcgggaactacggtgagactgcagtatggaattgacggtgcggggatgcacccgggtgagagacatgagggatggctttgtttcaccacagacattggagaatataagctgccatttcttattcagacagagaaagcagaactgaaaagtgcagccggagatgtgccggatatggatacctttgtgaatattgcaaaggacgattttaaagaagcatatcgtgtttttacagaccgcagatttgaacttctgttaagaaatgccggacagaaagagaaagctctttataagggactctcaaaacagcctgtgacatttcagcatgtagaagagtttctgatcggaacgggaaaaaaggatcctgtaaaaattgaactgaaggcagatcagaacagcttttatgatatcagtgaatctgtccgcgaaacttttgcagtccagaggagcggatggggacatctcaggctggaggtagaggcgaaaggcgattttctggaagtttccaggcatgtggtcacagatgaggatttcataggaagctattatcaggtggaatatgtaatccgtaaagaaaagctgaaaaaaggacgtcagtttggtgagatcactgtgaagagtccttatcagcagctgacttatcagattactgcatccatggaatcgaaagtgcagctcaaaacagagattcatgtgaaacggcataagctggaactgttacgtgatcttgcagaatactcctgcaaaagaatggacagtaagacatggatcggcagcagcagatttgtccttaatcagttaagggaagaaggctgtgattatccggaatatcagatgtatgaagcatacattcttcatatggaagaaaaggatgagcaggcaagagaaatcctgaagaaatttaaacatcagaactttgtcagagagaatctggaactggcaggtgcttacctttatctctgcgttcttacaggattgcacaaagacagagaacaggcgataagacgtctgtacaatttctttctgcagaaggaagacagtttcctgttgtttaaactctggctggagatgaatccggaggataagggttccccttcaaggctagtatttatgatggaggaactttttgagaaaggctgcaggagtccgtttctgtatctggaagcatggaattatatcagcagtgatacaacacttcttcacagaatgagcagtttctggacacaggtatttttatttgcgggagagaaaggtcttctgacagaagagttggtgatgagatttgcctatcttacagggtatgagagagaattttgtaccagtatgtacagagcactggcaatgggatacgatgcttttgaatccgatgatacgctggaagcaatctgcagatatatcatgcttggaaatccgagaaaaccggaatatttcagatggttttccctggcagtggagaaagggatccgtctgacaaggatatatgaatattatgtggaaacaatggatacatcttatcagagagaacttccaaagccccttctgatgtattttacctataataatacttctcttgcagatgataaaaaggcatttatttatgcaagtattgtgggaaacagaggccgtcagccacagacatatgcggattacagggatcatatgaagatttttgccatgcgcaaggcgaaagaaggacggatgaatgagaattatgcggtcctttatcaggaatttttaagcaatcccaaaacagaaggacaggcaaaactgctcgcacagaagctgtttacacacagactgtactgtgatgataagaagatacgctatgtgatcgtgcgccatgaacagctcagggaagaagaaatttacccatgtatccagggcgtagcttatccaagaatttatacagatgatgcggtgatcctgtttcaggatgggaagcagagaagatatgtatcaacagtagattataatatcaagaaattatttgatgagcgtgaactgacagataaggttcttggttttcatattgaagagccgggactggtacttcactgcagtgagcatacagaactgaaaccggagaatcttcaggcattccagaggatcccggagtcagaggaattttcagatgaatatcagaaatgtatcagagagaagctgctttcttattattccgaacacaccagagcagaagaagcagataattatctgagacagatggattataagaaatatgcggctgtagacagaacagctcttctggaagtactgatctccagaggaatgtatcagcaggcaatgtccattgtttcccaattcggatatgaaggaatccgcatagagagccagctgaagctgaccagcagaatgctgacaagatgtgagatggaggaggatgacgaattgcttgcccttgcatcggatgtatacagacgcggaaaatatgatgaagtgatcctgaagtatcttatggaatacagatttggtcctgtagatgaactgatatctgtatggaaaagtgcgcagggctttgagatggatacttatgaactggaagagaagcttcttggccttctgatgtttacttctgattacaggaaagagggagagaagatcctggaggattatgttcatcacagcggaaaggaacgtattacaggagcatatcttacgcagactgcatatggtgcatttgtaaaagaatatccgatgagtgtttttgtaagaagtctgctggagcgggcttatgatgagaaatggccggttgattttgtatgcagtcttgctcttttggaagcgtattccaaagaaaaaaagctggagaaaaaacagctttgcaatgcagaggagattcttcagaaatgtgtgaaacagggaatgtactttgcgttcttcgggaaacttccggtatctgtcttaagtccttatcagttggatgataaaacctttgtggaataccatgcagatccgtctgcaaaggtgacactctattatgcactggatgcaggcctcggaaatcaggtgaaatatcagacagagcctttgcgtgatttatatgaaggtatttttgcaaaatcatttacattgttctacggggagacattgcggtattattttgaatcagtaacaggagagcgggtaaatcggacacaggagagggtacttacaatgaataagattgagggtacacctgtaagcaaatatcatatgatcaatcagatgctctctgcacgcagactggataaaaagaaagaagtgttttcacaggtgaagaagtatcttcgccaggaacagtatgtgaagaagatgtttgtgatcgagaaagaagagcaggaacagattgtcctgaaaccgggaggaacaaatgaacgaaattcgtgatttgatcgtgggaattgattttggcaaagagtattctcagatatgctattatgacagaaaaggagacgaggcacgttctctttctatgaaagcgggtggaaatcagtatgaggctccctgtattctgtgctggagaccggagcagaaagactattgcgtaggactggaagcagattactttgtccgggaaaagggcggagtcatgatcgatgatgtctatggaatctgtgaaaaaagtgattctgtgctggtggaaggacaggaacttgcaccatgggagatcctggctcagtttctgcagggaatgcttaaatttctgggagtggcagaactggtcaaaaatactaaatgtgtggcggtgacactgcccgggctgacggaaattcaggttgagaatttccagaaagcatttgagataattggatttccacatgagaaatatatgctgctggattatggggaaagcttctattattatgtgctctcacagaaaagagaaacctggaaccgcagtgtgggatggtatgcctttacaccggagaacgtgtcttttcgcaagatgacaatgaacggtgcaacaaagcctgtcactgtaaaactggaagaagctgtggagacagaacttcctgctgagggacaggagagagattcagaattcggtaagtttgtccagaaaacacttggcagagatctgttttccagcattcagatcacaggagatggattttcacaggactgggcagagcagtctgtaaggttactctgttatcagaaaagaaaggttttctatggaaataatctttttgcaaagggtgcctgcgctgcaggaaaagagaaaacagagaacaaggcattaaagggatatcgctttttaagcgattctctggttatggctgatgtggggatggaaatgagagtgatgggttctcctacctattatccgctgatcgaggcaggaaataactggtatgacagtaaggcatcctgtgaatttattcttgatgatacagaggagcttgtgtttattgtaagcacgtaccacagaccggagaaaagaagggtaggaatgatgctgcccggtattccgttgcgtccggacaagactaccagattacggctggaattacagtatgtctcatctacagaatgtaaagtgacggttacagatctgggattcggagaaatgttcccttccagtgggaaaacctggacagagacagtagaatggtaaaggagatggagcaatgagcggatatattttatgtcagacaaaaaaggcacagcgtccttattttatagagaatatcagtatgaatatttattctatagaagaactctgttattatctgtaccacaatctttaccttgctgatcatactgtttttaatgaagaattatgcaactggctcagagatgagcttgaacttgtgcatctggctgcaaagctgaaacagaatctggagagaaatgtaagtgtggaagagatgatctatcctgttttcaaggagatcaattaccttacctatgaggagatgaaaggctttaacagcaggattgtgacttatggaaaagaaaaagcggcagtccgtcagaagagaaagggagatgcactgacagaaaacggaatgtatgtgaacgccatccgggtataccagaaactcctggaaagagaggatctgtctgagcagagaaaaggattcgctgcttcagtgcgctataatcttggttgtgcttacagttatctttttcagatggaaaaagcacaggaatgttttctggaagcatacagagaggcacattcaaaagatgccttaaaagcttatatcatagcatacagcagtgttcatgataagacagattatgataaggttatggaagaacttgaagtagatgaagaactgaagaaagatataaaagaagaaatcaggcagtctctgaaagctttcgagtctgtatcggaagagaaaacagatgaaaaaaatctggatgcccttctggagagacttatgaaagattatcacagaagtacaggttcataacttacgcttgacagaggcggaggtgtgtgataggattaacacatactttcacatggtagagtggctgtgtgataaataacaaaacagataaagaggagatatttatcatgaaaaagagatctttagcagtactcatggcaggagttatggcagcttctatgatgacgggtgttgtttctgtatatgcagatgctgacagtaagacattaactgtaggatttgatgcacagtatcctcctttcggatataaagacgataatggagagtatgttggttttgaccttgaccttgcacaggaagtatgcgacaatctcggatgggaacttgtaaagaaaccgatcaactgggattccaaggatatggaactgaattccggttctattgactgtatttggaacggatttaccattaacggacgtgaggatgactatacatggtcagatccatatctgaacaatgagcaggtgatggttgttgcagccgattcagggattgagaagccggatgacctggcaggcaagaatgtagtagttcaggccgcttccgcagcactggatgcattaaacagcgatgataataaggatcttacagcaagctttgcatcactgacagagaatcctgattacaatacagcattcatgaatctggattccggcgctgcagatgccatcgcagtagatatcggtgttgccaaatatcagctttcccagagagaagaaggcaaatatgtgatccttgacgagccaatccagagcgaagagtatggaatcggctttaagaagggtaacgatgagctgaaagatactgtatgggaagaagttctgaaactttatgatgcaggtgaagttgataaacttgctgagaagtatgaagtagcagatatgctctgcattggagatgatgagaaatctgatgataaaaaagatgatgcagcagaggatgatgcttccgatgcagacacagcaaaagaagatacagctgatacagcgaaagatgctgaatagtcagctggaacaaaaacagttatgatacaagaggacagatctgtgcaggctgtccgcattataaaggaatggagggtacattttgtgcaccctcttttcttactgtacaggagaaatttttcaggaggaaagcttatgtctttaagtgtaatgctgcagcagcttgccagtggtatggtagtttctgtagagatttttgtagtgacattacttttttcacttccgctgggacttctgatctgctttggcagaatgtccaagaatccggcgatacgtggaattatgtctgcctacatatcagttatgcgtggaaccccgttaatgctgcaattgatggttgtgtatttcggaccatattttatttttggaatccgtatttccatgggatacagcctgatcgctgtgtttattgcattcagtattaactatgctgcatattttgcggagatttacagaggaggaatcgaatctatttcagcgggacagtatgaggctgcaaagatcctgggatacagcaaagcccagacatttttcaggatcatcctgccacaggtgatcaagagaatccttccatctgtgacaaatgaggttatcacactggtaaaggatacgtcactggcatttgttgttgctgtttcagagatgtttacaattgcaaaacagattgcaagtgcacagacaactatgatgccttttgtgatcgctgctgttttctattttgtgttcaatcttcttgttgcgattgtaatggataagattgagaaaaaactgaattattatcgctgagaagtggctggggttataaaacattttttgactctgacatcatttaatttaagaggaatatttgctatggtattatttgaaatgaaaaacataaagaagagcttcggcagccttgaagtattaaaagacatttcacttcaggtagaggagggtgaggttcttagtattatcggaccttccggttccggtaaatccacacttctccgctgtgccaccggtcttgagacaccggacagcggtgagatcatcaagcagggggatgtgggactggtatttcagaactttaatcttttcccccatttttccgtactgaaaaatatcacagatgctccgatcagagtgcagaagagaaagaaagaagaggtttatgcacaggcaagaactctgttaaagcagatgggacttgcagacagagagaatgcatatccgtttcagctttccggcggccaacagcagcgtgtctctattgccagggcattatgtatgaatccgaagatcctgttttttgatgagcctacttccgcccttgatccggagcttacgagtgaaattcttaaggtaatcaaagatctggcagcagaacacatcactatggtgatcgttactcatgagatgacatttgcaagagatatctctgatcatattatttttatggataagggactgatcgcagttgaggggagtccaaaagaggtatttgaatcagaacatgcgagaatgaaagaatttcttggtaaattccatcagggataaggtttttgtggttgcttttagaggaatgatgttatataatttcaacgtacgtggttgagaaaaacgtacgtacagaagtgaaataaaaggattaaaaataatatcctataaaaaacaggagagtgaagatgagtacagacagatatgtaagtcctttatcagaacgttatgccagcaaagaaatgcagtatattttttccccggatatgaaattccgcacatggagaagactctggatcgcacttgctgagacagagaaagagcttggccttaacattacacaggagcagattgatgaactgaaggcacatgcagaggatatcaattatgacgttgcaaaggaacgtgaacgtcaggtgcgtcatgatgttatgtctcacgtatatgcgtatggcgtacagtgcccgaaagcaaaaggaatcatccatctgggagcaacctcctgttatgtaggtgataatacagacattattgtaatgacagaagcattaaagcttgtgaagaagaaactggtcaatgttattgccgagctttctgctttcgcagataaatataaagatcagcctactctggcatttacacattttcagcctgcacagcctactacagtaggtaagcgtgcaacactctggacacaggaattcctgcttgatctggaggatctggagtatgttctgggaacaatgaagcttctgggatccaaaggtacaaccggaacacaggcaagctttctggaactgtttgatggagatcaggagactatcgacaagattgatccgatgatcgcagagaagatgggatttaaggaatgctatccggtatccggacagacctattcccgcaaggtagatacacgtgttgccaatattcttgcaggaattgcagcaagtgcacacaagatgtccaatgatatccgccttcttcagcatctgaaggaagtagaagaaccatttgagaaatctcagatcggctcttccgcaatggcgtataagagaaatcctatgagaagtgagcgtattgcttccctttccagatatgtaatggtagatgcccttaacccggcgatcacatctgcaactcagtggtttgagagaactctggatgactctgcaaataagcgtctgagtattccggaaggtttccttgctattgacggaatccttgacctctgtcttaatgttgtagatggattggttgtttatccgaaggttatcgagaaacatatgatggcagagcttccgttcatggctacagagaatatcatgatggatgctgtaaaagcaggcggtgaccgtcaggaacttcatgagcgtatccgtgagctttccatggaagccggaaagactgtcaaggtagaaggcaaagataataatctgctggaactgatcgcagcagatcctgcattcaacctttctctggaagatctgcagagatccatggatccgaagaaatatatcggacgtgccaaagagcagacagagagatttgtaaatacagtagttcagccgatcctcgattcccataaggaacttctgggagtgaaagctgagatcaatgtctgatcagtaaatacttaacataacggtttggaatattacagaatctgatataaagataataagcgttgctgtttcctgatgatatccggcaggtcattctgcaaggtcgggtaaacagtaatcggtaaatacaggaggaattatataatggtaaaagcagttgttggtgctaactggggagatgaaggtaaaggtaagattaccgatatgctcgctgagaaggctgatattatcgtaagatttcagggtggtgcaaatgcaggtcatacaatcgtaaataactatggtaaatttgcccttcatactctgccgtcaggtgtgttttatgatcatactacaagtgtgatcggcaacggtgttgcactgaatatcccggtatttttcaaagagtacaatgaagtggtaagcagaggtgttccggctccgaagatccttatctccgagagagcacagatggttatgccataccatattctttttgaccagtatgaggaagaacgtctgggcggcaaatctttcggatctaccaagtcaggtattgctccgttctactcagacaaatatgcaaagattggtttccaggtaagtgaactttttgatgaagaacatctgaaagaaaaacttgcaagtgtatgtgcgacaaagaatgttcttcttgaacatttatatcacaaaccgcttcttaatgtggatgaattatttgctgaacttatggaatataagaaaatggttgaaccatatgtatgtgacgtatccctgtatctgtggaacgcattaaaagaaggtaaagaagttcttcttgagggacagcttggttctctgaaagacccggatcatggaatttatccgatggttacatcttcctctaccctggcaggatatggtgcagtaggagcaggtcttccaccatatgagatcaaacagattgttactgtatgcaaggcatactccagtgcagtaggagcaggtgcatttgtttctgaaatctttggcgatgaagcagatgaactgagaagacgtggcggtgacggcggtgaatttggtgctactacaggccgtccaagacgtatgggatggtttgactgtgttgcttccaaatacggatgccgtcttcagggaactacagatgttgctttcacagttcttgatgttcttggatatctggatgaaattccggtctgcacaggatatgagattgatggaaaagtaacaacagaatttccgacaactacactgcttgagaaagcaaaaccggttctggagactctgccgggatggaaatgcgacatccgcggaatcaaaaaatatgaagatctgccggaaaactgcagaaagtatgttgagttcgttgagaaacatatcggattcccgatcactatgatttccaatggcccgggacgtgacgatatcatctacagaaataaataataaggataaatttacctgtctgatcggcagacggtaaataagactatacgccggggaatttctccggcgtgtcttttatataactggaggcttatgaaaaaagataataataagataaaaaaaatcggggcatggatcgcaatcataatcctgcttcttgcatgttgtatgccgatgatttttgcattcgggaatggagaagattcgcaggtctattttaaagcctcgcttgcagtggcgatcatggttcccatcatggcttatgcaatatggattgtttataaattactgaacaggaataaaaaggtggtggattcggatatggagaatattatttttgacgttggacaggttcttgtaaaatatgactgggagacctatctggacagttttggttttccgaaggaagagcgtgataaaattgcggaagtggtatttcagagcaatacctggaatgagagagacagaagcagcgagactgagcaatattatgtagatcagatggtaaaagctgcaccggagtacgaaaaggatatccgggaggtaatgcgccgttctgacgagacaattgagaaaacagattatgcggaaacctgggtgagatatctgaaagataaaggatatcatgtttatattctttccaattatgcaactgacacactggagagaacggaggataaacttacgtttcttaaatatgtagacggagcagtgttctcctgtcaggtgaagcagatcaaaccggaaccggaaatttacaaaaccctgctcggacgctaccatcttgacccggagaaatccgtatttctggatgacagagcggagaactgtgaggcagccagaaaacagggaatccatgcaattcagtttaaatcttttaaacaggcagcagcagaactggagaaactgggcgtcaattaaaattgtgactgttcactccgttctcagtaacatagccaaaattcattctagtacatcgtttcgtaaataactataccaatcgcgtaggatgcggattcgagtgtgctggtataaaaacgcaggcgtagcgggctacgctgaggcttttagacctgtgcaatcggattcgcagacaagtgagtggtatagttatttcgaaaacgatgtactagattgcctgcggcaatggaattttggcttgtatgtctcgggattttggcatattcatgccaaaacacctcgcgggatagtggtgtgtgaacagtaacttaaaattcactaaaaatacaaagaatatcatttgtatttttaactgaaagatgatataataataaagcttgtggaaggaatattttccatatgtttccgcacaggcataatacctatgaaatattggaaaagaggattaaaggaaatgagcgataaaacaatcttagagcagtggcgtgccatcgcctatgaccagcaggcagaccgtaataaacttcagagattttgggcaaattattttaatattgaaaaaggaatttatgagcagcttcttagcaacccggatgaggtagtaaccggtacagttaaggaactggctgagaaatacggacaggaagttctgacaatggttggttttcttgatggaatcaatgacagtctgaagattccgaacccgattgagacaatggatgagaacacaaaggtttctctgtgcttcgataaagaacttctttataagaacatggtagatgcaagagctgactggctgtatgaactgccacagtgggatgcgatcttcacaccggagaagagaaaagaactttatcttgagcagaagaaatcaggaacagttgtcaaagcaaagaaaatcggacgtaatgatccttgtccttgcggaagcggcaagaaatataaatattgctgcggtaagaatgcgtaagcatccaaatctggaatatattatcgtgcttggtgcccatgtagaaggcacccggcttacaaaagcccttctggaacgtaccaggagggctttacagtatatggaagagaatcctgagactaaggctgttctgtccggaggaaaaggggacggagaatctatcacagaagctcaggcaatgtgcaattatcttgtggaacatggaattgacagagaacgactgatcctggaagagaaatctaccagcacaacagagaatctgaagttcagtctgggaatgatcggactgaatcattcggtgggcattgtcaccaataattttcatgttttccggggaacggccataggaaagaaatgtggatgcagagaaatttatcccattccttccagataccgttcatggagacttctgatatatattccaagagaaatcctggcaatcatcaaagataagctgatgggaaatatgtgactgttatgcgaatcactatttgacagagaaatatttttccttaataacagaaaccggcatttcctgtccggtccagatctggaaagctttagccccctgatgaagaagcatatacatgccattaaaggtctggcatccggttgctttagcctctctgagcagtcgggtttcctgtggctcatagacaacatctgccactacaagctcaggatggaacagagatgtatctttgatgatggtatcgtcgatatccggaaccatgcctacagaggttgcattgatcagcagataactctgtgcaatggaatctcgcaatgcagtatgatcatcattgtcgaagaggcagacctgacaacctgttttagcagagagattctcagcgaatttctgtgtgcgattccagtatctgctggtgcggcgggcaaaaatatgtacggaagccgcaccgtccagggcagactgtgcacagatggccatcgaagctcctcctactcccatgacagttatatttttaccggtaatatcatgtcccgcatcacgtacagattgcataaaaccgtacccgtctgtattgtatccgattaactttccgttatcgttcagtacagtattgacagcaccgatcagttgggcttcaggggaaagctcatccaataattctacaattttattcttattcggcatggtaaggttgaaaccgcgaatgccgcaagtctttaatcctgcaactgctgcaggaagagtttcttcatttacatcaaaacataaatatacatagtcaagcccgagaaggcgaaatgattcattatgcatcaaaggggaaatgctgtgtgccaccgggcttcctaaaagcgcggtaagacctgtgtgtccggtaatattattcatgttaaaatcctccagtctgttttgtagcagagacataaaatactgtctgaattgtgacagtatagaagatgcccttctaaaacatagaaattatctatcattttattctaacttcaattatatgtcaatacatgttcattttggtttgtatgatagttactgtcgatttagtgcgacaaataataagacataattcctccgttttgacaaaatccgcatactttatcacgtataatgaatctcacttaccgaagtgaaggagaagtcagaggcagtatcagacggagggaaggaaatgcattacgaaatatacatagatgtagtttttttcacaaatctcctgatagattacatattgatcagatttacaggaatattattccgatgtggaagaagcagaaaaagagctcttctgggagctgctgcaggtgcggtgttttcctgctggatcatttatctgcaatcttttctggagtctgggatttttcttccggcacttgtcctgctgcatggtggctgtgctgcaggaatgcttgtgatcggatgtaatctgaaaaggggaagtctgctgcttaaagcaatacttacactgtattttgccgcatttctgtgtggagggttctgggaagtgatcgtcagtgataagttgacagtcaaaatgtttctgatccttgcagcagcaacgtggtccggcattacagcgttgtcatatctgatggattccatgagaatacggacaaagaatatctatccgataaccatatactataaaggatgtggatatccttttcaaggattttatgattccggaaatctgcttatggattctgtaaacggaaaacctgtatctgtagggacagaaaaagttttatctgaaatatgttcagaagaaaccgtaagctgtttaaaacacctgaaagaaaatcccggagagtctgggaaaccgggaactgccgggcttcatccacattttactttttttcacagtataggaaaagaacaggggatgatgctggctgttacttttgagagactctgcattcagactccagcagaggttgtctgcatagacaatccggtatttgcattttcatttgaaacatccgcttttggtaaggaatacgaggtacttttgaattccagattactttaacgggaggggttgtgactatgagctgttatccattacaggtagtgtcaagaatggtgatgaaccgttcaggagaagttttttatattggtggaaatgatgtgctgccggcaccactggagccgaagcgtgaggcgtttatactgcagaagcttggaacagggcaggaagaagaagcgaagtctgttctgatcgaacataatttaaggcttgtggtgtatattgcaaagaagtttgataacacaggagtcggggtggaggatctgatctcaatcggaacgattgggctgatcaaggcgatcaatacctttaatcctgtaaaaaacatcaagcttgccacttatgcatccagatgtatagagaatgagatcctgatgtatcttcgccgaaacagtaagacaaagatggaagtgtccatagacgaaccgctgaacgtagactgggatggaaatgaactcctgctttctgatattctgggaactgatgaggatgtgatttcaagacgtctggaagatgaagtggagatttcgttgttatcaaaggcaattagaaagctttcaccgcgtgagcagacgatcatccgccttagatttggtctgggaaaggagaatgctgcagagaaaacacagaaagaggttgcagaccttctgggaatttctcaatcatatatttccaggttggaaaaaaggatcatgaagagattgaaaaaggaaattgtgaaatatgaatagacgtaattggggaatgtagtataatgatataaaggatagtaactattcagcaatccgcctgtaactgtgaaagcactgaacggttatgatataagcaaactgtgggaaatgtttgcagtgggtgattcacagatatcaagtcggggaaagaaaaaaggacagaagagaaaagtgaaggtaaataaaatacagacagaagaaaacaaagataaaactctgaggcatgatacagaaagctgcatactggcagattgcagtttatgtccgagaaattgccatgtagacagaacagccggaaaaaccggatactgtggaatgaatcagaaggttaagattgcaagggcagctttgcatatgtgggaagaaccatgtatttcgggaaccagaggttccggggcagtcttttttacaggatgcaatctgagatgctgtttctgccagaaccgggaaattgccattggtgacagtggccttgagatcactgaggaaagactggcagaaatattcctggaactgcaggaaaaggatgctgcaaatatcaatctggtaaccggaacacattatattccacagatcatcgcagctttggactgtgcaaagaagcatgggcttaatattccggttgtctataactgtggtggatatgagaacacagagacattgaaacttctggacggatatgtggacatttatcttccggattacaaatatgcggagagcgaattggcggtgaaattttcacatgcaaatgattatcctgaaagggctatggaagcagttaatgagatggtacgccagacaggaatgccacagtttgatgcagagggatatatgaaacgtgggactattgtgagacatcttatattgccggggcatacaagaaattcaaagaaggttctgaaacttttacataagacttttggaaagcagatttatatcagtatcatgaatcagtacacaccggtttttgagcagaaagaatatacagaactgaatcgttgtgtaaccagaagagaatatgaaaaagttctggactatgcatttgagcttgggattgaaaatggattttttcaagatggtgaaactgccagagagagttttattcctgcgtttgattatgaaggcgtgagaaaaatgccataaaataaaaaactcccataaatggaaggaggccggtactttcgtaccggcgcgtatgaaaaagaaaaatatttataagaaagattcatcatctttctacaattcattatatccaataaatatgaataaaatatgaatacagtgtaaaaaaataaaatttgttttaccaaaatatttttagaattttttccatgtatcccttacaaacaatatcagtaacgggaaaatctcaagacgtcctgccagcatatcaaaagtaaggataagctttgaaaaccaggagaacatgccgaagtttccggtaggtcctaccagctcaagacctggtccgatattattaaaggttgccgcaaccgccgtaaaattcgtgatcagattgaaatcgtcaaaggcaatcaggaatatggaggatgcaaaaatcagcatatatacaatgaagaaaatatttgtggaacgaacaacttcatgtgggatggctttgccgtccatttttattttctttaccgcatttggatgcagaaaaatatgaagctccttgcggactgttttgcagagaatcaggatcctggatactttaatgccgccgcctgtacttccggcacatgcaccgataaacatcagcagcaccaggattgtccgcgaaatttccggccaggtattaaaatctgttgttgcatatccggttgttgtgataatggaaccaacttggaaagccgcctgctgaaaagctttggctgcacttccgaaaatatggtaaatattgcaggtgatgataagaattgcaataccgatgattccgaaataataccgcacttcttccatcttaaaagcctgagcaaatttttttgtgataatgaaaaagtaagcattaaagttaacgccaaataaaatcataaatacagtaatgactacctgcagatatgtactgtaactggccatgctgtcatttttaataccaaatcctccggtacctgcagtaccgaaagctgtacatatggagtcaaacagcggcataccaccgaccagaagaagcaggatctggatcactgtcattacgaaataaatagaatacagaattttggcagttgactgtacttttggtgcaagcttgcttacagatggtccgggactctccgctttcataagattcatatgataaccgccggtaagtggcagaagggagaggatgaaaaccagaacacccattccgccgatccagtgcgtgaagcttctccacatcagcatacaatgaggaagtgcctccacatcgctgagaatactggctcctgttgtagtaaaacccgaaactgtttcaaataatgcatctacaggatttggaatgcttcggctgatcacaaaggggattgctcctatgatactcagaacgatccagcttaatgctacagtcacgaaaccttcttttgtgtagaaagcctttcttgtcggctttttcctggtgagaggaagcccgatgaccaggcataaagcaatcgtgatcagaaaagctacaccggaagtttcctgatagatcagtgccgtaattgcgggcagagccataaatacagcttcaatttccagaatcattccgatgatatagataataatggaatagttcataattcggctcctttatttttccagaatatctgtgatatcgcgaaggcccttctgagaagttactatgataacggtatctccgacctgaatggtatcctggcctcggggaatcttgacctgaccatttcggttcaggtaacctacaagaaggtttttcttcaggttcagtttagataatggaatgcctgttaccggtgaattttcgcggatggcaaattccagagcttctgcctgattatccaggatatgataaagggtttcaatattgctgccgatgctgttctgcatggcacgtacatactgcaggatatagtcggctgtgatatatttcggataaatgacgcttccgatatcaaggttatcaatgacatcatcaaaggcaaggcggtttaccttggcaaccagtttggcattggaaactgttttggcaaagagtgaaaggaaaacattttcctcatccatgtttgtgagtgatacaaaagcctctgtgcgtgagagtccctcttccataaggagagaacgattggttccgtctccgttaatgatagttgcctccggaagcagatcacttaaggtttcacagcgggactcattctgttcaatgatcttaacggagatgttcatatcaagcagggcttttgtaaggtaataggaaatggttcctccgccgacaataatggcgttttttacctgattggttttcaggccgatctttttgaaaaaggctgctgcattcaccggggaagcaagaatggaaaccatatctccgtcgtggatcacctgattaccgccgggaatagatacatgatcccgactttctactgcgcagaacaagacatcgcatttcagggcttccgtaatgcgtgagattgtcatgccatccagattaaattcaggaagcactttaaatttcagcatttctacacgaccacgtgcgaaagtatcgatcttgatagctgaagggaagcgtaagagacgggaaatttcctgtgcagctgcaagctccgggttaatgatcatagtaacacccagacgcttcttgatgaagctgatctctttggcatagataggattgcggacacgggcaatcgtctggcaatggccggttttctgtgcgatcaggcagcagagaagattcatttcatcagaaccggttacggcaatcaggatatctgcattctcaatacctgcttccaccagcgtgttgatacttgcaccgtttcccacgatacccatggcatcaatgtcattctgaagggaagtgatcacattagaagaaacgtctataagagtaatgtcggattcttcttcctgaagctgttctgccagggtacgtccaactttaccgcacccaacaataattatctgcataattcctccaataagggggctgtcacataatatctatgtgagacagccccttttatatcatatttttgtttgtaattgctcaatatttttggcaattacttttgtggctattaagctaagaatactatagcaccaccagatatatttgtaaagcaaatatgaaatttctgtgatttttaagatggagcgtattactgttcattccgttctcagtaacacgcttcgcgatgctaatcgcataaattcgcgcagtatgtcgcaggttttggctgcgtactttatttattgctgttgcatgatgcagtgcagggattatcaaatcccggggtaaaagcatagaagtttttggcatcaagttcttcctgaatggactgaagagcttccccaaatctctggaaatgaacaacttctctggcacgcaggaatttgatgggatccgcaatctcaggtatattgcggactactctgagaatattgtcataagtagaacgggctttttgctctgcagcaagatcctcgaacagatcagtgatcggatcacctttactctgaaattcacatgcattaaatggtacgccacctgctgcctgtggccagactcccactgtgtgatcgatataatacggtccgaatccggatttctcaatttcctccatggaaaggtcccgggtaagctgatgtacaatagtggataccatttccagatgactgagttcttctgttcctatgtcgttgagcaaagctgaagtcgttcggttcggcatggtaaaacgctgggaaagataacgcagggaagcgccgatctcaccgtccgggccaccagagtgcagtaccctataatagtcccgcaaccctagtgtttatgcgggtttgcgggattttcaattctgaaaaaatattacgaaagtgttaaaatgactgaaatggcactttttatagaagtctgaaattcaggaaataatgatgtcaaaagacatttttccggattccttatcatatatgatctgttccacaacacttctgatcaggtttcccttttcttcataacctacgtctggattcttcaggacatccgcaacagaacggatctctttcaggatttcttctgtgtcaggctgctctgcctgttcttcctgtaatagctgtgaaagggcagcagtcaattctaaccgatctgataccagacggtccttattattcttatattcttccagagtatctacgcctgcctcataagcctctttgattctgctttctctcatggtgagcttactgatttctttttgtaactgttcgatctgcagtgaatgatcagtctttttctttttacatacatatgtaaattctgccccatctaagatatgatcaaaataacttatcacagcttcttcagcctttttgaccgataaggcaacagaagtcttatgaaatccctttgcgtacttccagcactggaaataaggacacttattattaccggtgtaagaaagcgtggccccgcagacagagcacttcaaaagaccggatagccagtgcttacaggcagagacattccgtgccttgaccgggcgtttccgggaagtgatcagcttctgacgtttttcgtaccgttccctggaaagacgtacctcatggtttccttcaaattccactccgttccagacaacagttccgcaatagaagggatttccaagaatccggtcaacgctgcgccgttcaaagagttttccccgttttgtccggtatccgagatcattgcaacgcctggcaatagctgtttcatctaagttctgattatcatacaggtccatgatataagagacaatggcatattcagcttcattaatgatataaggttttccatgtccaactgcagtatagccaagacagggagatgtctgatagcctttttgcagggctttttctttcatgccacgcaagacctcacccgacaatcgaatggaatagtattcatccatccattcgatgatgcgctcgatcaggctgccaaaaggtccctcgatcaatggttcagatacactgatcacgtctacattatccttcttgagcatactcttgtatacgatagactcttcctggttacgggcgaaacgactgaatttccataccaggatcacatcaatggggtgagagggctgcttcgccagggcaatcatcttctgaaactccgggcgcttctgtgcatgccggccggaaacactctcagtaaagataaagtctccggaaacaatcatgtcattcttctgggcataatccagcaaaagacgtttctgcgcatcaggagaaagttctgtttggtcctctgtcgagacgcggatgtaaagacatgccactttactgctcataaatatcacctcggttttataaaatatgtaattttaagtataaaaataacagccacacaaatgttctgattgtgtaactgctccgaagatgatacaatatctttgccaaagtacggaatctcttcggagattcttgagccgtccctgctaccaacaggggcggtttttattataataattcagagatcacaattgataaatcgggatatatacatactagaatttcatcatcaaaagagtataatccggtacccgattcattttcaaaatcgtaaacgtttacaatccccttcataggattaatgatccagtattccctgactccggacatacggtatttaaacagctttattccgtaatctttactctgggtagcaggagaaacaacctcaattacccagtcaggtgcaccatgacaacctttttcatctactttgtccggtgagcagacaactgttaagtctggttcgacatagttcttgttatcttcattcaggaacactgcaaatggagaaacatatggtttacaggatccgtttttacttttaatgtaattgcggatagtagcatacagttcaccgacgattacctgatgtctggtattaggcggtgccatcatatagatctgcccatcaatcagctctgcacgttcgccatccggaagagcgtagatgtcatctattgtataaatccgttctttgggtaatggcataatgaaaactcctttcgttaatccattgatgtgatcacatatatacaaatgttcgacttgtgtaactgctccgaagatgatacaatatctttgctaaagtactggatctcttcggagattcttgatccgtccctgttaccagcaggggcggtttttatatgaatttttgtgtgattagctgatttaaacgttcaagcaaatcgtttggaaaacccaaaacatcaaatatgctttgaccattgaaatgtatgtctttataaggtgaaagaatattaaataattcggatctaaatctgaattattagatattctcaattcaatcaatttctggtgattccccgtcattcgaggcatctgttcaaacgagaatgtttggttgctgttaccagtaagggcactttttgaagacattattgaatgcaatgataattaaataaacagggattcttcaaaaaatctgcttgtataggaattagggcatcttacccatccagaaatatcagcatcctcagcccggatatatatataggcactgccgccagaatatttaattttatttacagtacatacttcgtaagcatctgttgtatagataatatttccgttaggggcgttctttatattcaatgattttgcacatttccacatattttgtccaccaagaaggggattgtatgatttggaataagtgacaggatatgtagttttggaaagcttcagagagcttccggaaagtttataagttatggtatattgaatagaaccgactcctcctggcattgactgcatacggatttgaatgtaatttgcaccaactttttgagtaaaactattatggcgagcattgaaagcacctttacgatgcgacattaaattgacagcagatacaagttttccagatttataagtcaataatttgtcgtaatcaatgtgatcattatcaatgtcttggcattttagcttcaaaaaatgtttatttccattgagagtataaagatctgcatttacaagatatatgttttgggcgtttaaactaaaactttttttgccattcacctcaatgttcagataagattccgacttgaaatttattcgaattttatcagccttgccatcaccggtgatgtcatatttagagtatgctacatttggccgaatggaaatgttacttttttgagctgctttaacagttagcggcatagatatggtgctgattgtaattagggcaactgtaaaatattttaataatgtctttttcatgtgaaaaacctcctgtattcaagaactcattcgcagttctatgagcttttggtgatatccagtcattctagacatctgttcaatagtaaaatctctatattcttccaatagcgaatctggtaataacagctccgttctttaatctgctgatgaaatcatatgtatcaccgcaaatggttcaaaataaataacataattatcaacaacagcgtatacaccgtatttagaatgataacactgtatagcctcttttaaatattcttccgtagcgttcagatattcagccatctcataaagattcccacatcctgcttcataagcgctgatcagaccggtaagtccaatctttagattatacccataaagccgagctcgatattcctgctttcggctttctaccttattctggtctaaaatgtttccggagctggtgcgataatgcccgatttcttcggcaagcacacaggatttttctgcttgtgtttctatatcctttcggattgctatgcgactgccgcggatcaggccatcatgttcagtaagaggttgttctttaacaagtaacccttcttgatcggcagcagtcagtaattgttcgtaattcaattgggatcacccctttagcgattaaaataaaacggttctctctaagctgtttgcttgtagtcaacaactgcaatttcagtcagcatacctttaactttttgaataatttcttcaattcgttcaagtgtttcaccatttaagtattcttccccacattgagaacacttttcacaaggaacattcttgataatgatatagcatccctgataatcagtcatgtaagttgttgtagaagattcaatattacctttgcagtaaaaacaagtcattatgcattctcctttctggttttgaaatcagattcccatttatcaaaactggggaaataagctgttataaggaacaaatccgattcgtgatttccgatgactacatgaagatatttatcttcgatgttcattcccagaatcaaacaactggggtaaggataatcatctggatattgttcgatgatttctccattcataatacaggctattacatcttttaagaatatcctacgctgttccagccttttagctgcgtggagtgtaatacgaatgtttttaggtatacatagtttacgcaattccaatatatctaatgccatgtcattcctcccattttgaatcatcattcataatatccaaatcatgctgaacaccttcgggtgtttgctcaacatccgtccgggtatgagctgcaagaagatcttcttccatctgctgggcggagagaaggttcttagagtaggcgagaacctttctctggttatgaggagacaactgattgcagatttctatgatttccttgcactgagcagagacggaagagttctgaacagattctgctttatagggagttctttccataggaacgtcaaaacccataagccatgcttcacttacgttcaatgcatttcctagaataaaaagcttttcttggttaggctctgtttttccagaacagtattgacttatatctgacttattcatttttacattatacttttgacaatatggaacagtcaaattaagaatatcaacctgccgaagtccgcgcatattcattattgtttttaaacgaattgcagtgttttctttcttcataatgttctccttttcgtaattgaaatataacacatattatgcaaaagttcaataataaaaacctaaaagttaaaaaaattgaattttatgttgacagaaaatggacgacgtgatattacacagataattcaaaagcttgaaccggaaaggaggtatcaagttggcattcgattataacaagctacgaggaagaatcgtggagatttttaacactcagtcgaacttcgcaagtgcaatgggatggtcggagcgcatattgtcaccaaagatgaatggaatgtgttcatggaagcagatagatatttgtaaagcaatacagttgttgaaacttactattgaggacattccgatcgtatgtactcgggtaggtcactactctgtacttacaggataagagcatatgagaggagagtcaacgaaagtcgttcgacaaactgcttaaatttgtataaacagtaactcatacatatcatttcccataccataaagaagaggtgaggaagatgtcagaattaaaactggtaacaagaaatatccgtattaatggaattcagcataaagccagtgatatgtcagaagaagaaatcaaatgcctgctcatccagagacaggatataattcttctgaatatgaattacgaaagaaaagccgccggttaaggcggagaaaggaggaacatattaaggttgcgaatcatagaatagaagacctggaaagaaaaggagaatgattatggaacagatcacaaactatgtaaaaccggaactcatcgtagtagctattgccttatatttcgtaggaatggcactcaaacaggcacaggcagtaaaggataagtacatcccgcttatccttggcggaatcagcattgcaatctgcgcgatctatgtgtttgccacctgcacctgcggtaccggacaggatattgcaatggtaatttttacagcgattacacagggaatactgattgccggtctttctacatacgtgaaccagattgtaaaacaggcaaataaagacgaataagggatgagaaaccatcccttttcgctctatgaaaggagacggacatggaaataagaggaattgatgtatctgcctggcaagggaaaattgactggaaaacagttgctgattacggcatggggttcgcaatcctgcggattacagaagcgggaaacgtgatagatagctactttgagcagaacttctctgaatgccggaaatacaatatcccggttggggcatataagtattcctatgctatgacagttgcagagatacagagcgaagccaagaaggtcgtggaagttctgaacgggcgaaaactgcagcatccggtctggctggatctggaatggaataatcagagaagccttggagctgaacagatccataaattggcagaagcattcgaaaagattatcacggcagcgggatataaatttggtatttattgcaatgcggattggtacctgaatgtaatctgcagccatctgaaaaaatatgatttctggatcgcacgttatccggcattagataacggtactttacaggaacgactccggccggactttggtgtgggctggcagtattccagtaaagcaaagatacctggcatcagcggaactgtagatagaaatatattttacaaagattataacgaagcaaaagatataaaaaaggaaaacacagttatgacaaagagtgaagctatcaacgtagttctgggaattgcagaagaagagatcgggtacctggaaaagaaaaataacagccagcttgacagcaagactggaaatgccggatcagcaaactatacaaaatattggagagatataaaaccatcctatcaggggcagccctggtgcgcagcgtttatctcctggtgtttcatgaaagcttttggtctggataatgcaaagaaactcttaaaacactggccgtatgtatactgcccaaccttaggcgtcttatttgtaaagaatgccaatccaaaagttggagatgttgttatctttaaacatggcggtacctttacccataccggctttgtaacaaaagtagccggagacagattctggacgattgagggaaatacttccggagcatccggtatcgtggcaaatggtggcggggtgtgccagaagagctattacaacagtaatcttccggggacaaaattttgtacaccggactattcaattgttttatctgcagataaagatgaaacagacaagacaacaaacccagaaggaggcagctacatgtttaacccagagacagtaaaagcaggagacaaaaatacatctgtgcttctcttacaggaaatattaagagccagaggctttaaaggcaaaaacggcaaagccctgaaacttacatggacagcagatgcaaacacgatttacgctctgaaagcttatcaggaatccagaaaagaagttctggaagtggatggtatttgcggatctgctacttggaaagatttaattgcgatttaaagtaaatataaataaaaaaagagtatgggtacaatgagtacccttacccataagatattgtatcagcttcattgcttcttatatattatagggtattacactatgggccaccgtactggctcatgatatactgtgcaattttggcattgggttgtgtgatattgatcggatattgaagccttttttcataattccacataaattatctgcacgctccttccttttcccatgggaatggctgttccatccatttccagatggattctccggtctgatctgtaatgtcaataatcaggggaccatatgcttcggcgtattcttttaatagcttttttcgttcctgcacaagttcgtgacagtaagtcagagccttttcatcacagggatgtgtgtcaaggtacagagtcatatcattgactgcgaaactgacctgatcgatacggtttaataactgtttttgggagcaatctgttttcatcttcgaatacctctctttccacaaaatggtttgcataactgtgggaaaatggttcctgcatttaatgcatactgcagtgggaaattctctgtaaacttctggcagggaacatatgccattgcaggttccagatactgaagatgcgaaaacatttcatgttttttttctttgacacctggtatagtacagctacagcctgtcgtgtttctgacagagcattcggaactgttcatatttctatttgaaggctgaggcatattcataccgcaggtacggttataagggcggttgccggaacatcccatccgataattttccatatataattcccttctctgaaaactgtttacattatattttatgtcatgctcataaaaccgtgctcatacaagtcgaaatttcattgccatagtgaagattcgttactgttcacataccactatcccgcgaggtgttttggcatgaatatgccaaaatcccgagacataacgaagattcatatcgtctgacaggcagatttctttttgctttcgaatatgttattatatataggaaatatttgctgcctgctaagtgtcagcatccaaagaaagtcgggaggtacataaagatgaaacttacaatattgggaaccggaaatgcaaaggtgacgaaatgctataacacctgttttatgctaaataaagataaagaatattttatgatagacggaggtggcggaaatacaattctgaagcagctggaggacgcaggaatcagctggaaagaaatcagcactatatttgtgacacataaacacatcgatcatctgcttggaatcatctggatgcttcgtatgtattgtcagggaatggcaagaggacagtttggcggtgaagtgactatctatggacatgatgaagtgatcagcctgctgaaacagatggcagagatgcttctcacaccaaaggaaacgaaatttatcggagacaaagtccatctggaagaagtaaaggacggagaagatagaacgattctgggacacagggtgacattttttgatattctgtctacaaaggcaaaacagtttgggttctccatggagtacgcagagggaaagaagctgacctgttgtggagatgagccatataatgaatgtgaacagaaatatgcccaaaacagcacatggcttcttcatgaagcattctgtctgttctctcaggcagataaattcaaaccatatgagaaacatcattctactgtaaaggatgcctgtgagctggcacagaaactggaagcagagaatctgattctgtatcatacagaggataaaaatatttccagacgaaaggagctctacacagaagaaggcagacagtattataaaggaaatctctggatccctgatgatctggaaacctacaaattataaaaagacaaacctccggagtgtgtctgaaaaaggctttctgcaagatgtgcgtcacaatttgtgggatattgtgcccggatgagggcgccgtagcgggctacggcaactgaattcgggtgaaatatcccgcaaagtggggcgtgcagattgcgggaatgatttttcagacacgctccgggatacagaatgaaaaatctgggctccggaggtttgccttttttacagcaatctttttaaatgtatcatttatgagggttgccatagtgattatgctgtatggtccacatgtgttttggtgtcggaagacaaaacttcacatgtagtatgatcctgtaaaaaagtttccataattcctgaaatagtcctgtgcagataaggacggtactcagccagagacacaggctgctgatacagaatgcagctgtagcaggtggaacctaccagctcaatgatcgtaaagagcatcagttccggatttttataatgtagtccgctttgagcaagcatatccagataggactgataaaaattatattcgtcgtcaggcattttttcctcaaaagcacccttgaagacaccccaggcaagattctttgaaataaacagcaggagagtacggtctttattcaactcagtaagaatgtaatctataataaaatgtacctgcctgtcaaattcgctgatatgtgcattctgcacagcctcatgggcccggaaaaacaattctccggtcttgtgggaaaccagtttattccggatatcatatttatccttaaaatagaggtaaaaagtccccttggcaaccccggcctgatctacaatatctgaaattgtagttttggtaagtcccttcgtcgtaaaaagttcaaaggcagtgttgaaaagagcatcttttttcttctttttattcagctccagttttcccatttcagattcattccttcctctactgtatacataacattttaaccgaatcaggtaagtcccgctgcggagtttgcgaaaagcaataagcgtcttactgttcacagcaacataagcttactttgtaattatattgtgatcatatataattactattttaaacaaaaatgactggaagtcaatattacatttttgttctggaaaaatttagacaaattgtgaagaatgattattgactgaaagtcatttttgttatataacattccatgaaataaaaaatgactgttagtcatagaatgatcaaacagtatcaataataaagaaagaagaggagaaaaagatgattaaggtaggaaagtggattgcaaaacacaagatactgatcattatcatcggaattgcattgctgatcccttcatatctcggtatggcggcgaccagaatcaactacgatgtactgagttatctgccggatacccttgagacagttgatggacaggacattatggtagatcagtttgggatgggagccttttccatgatagtggtggaggatatggaactgaaggatgtagctgctctgaaagagaaaatcgaagcagttgatcacgtgaaaaaagtactgtggtatgacagtgtcctggatgtttccgttcctgtagaaatgcttccgaaggatttgagagaggcattttttaacggagatgcaactatgatgatcgcgttgtttgataatacaacatcatcagaaacttccatggaagctgtgacgcagattcgtaagattacttcaaagaattgttttgtcagtggaatgacaggcattgttactgatatcaaacagatcgcacttaaggaaatgccgatttacgttgtgattgcttcctgcctttctctgatagtgttgctccttgcaatggattctctggtagttccggttttgtttttgctctgcattggtgttgcagtcttgtataatcttggaagtaatatttttcttggtcagatttcatacatcactcaggcactgacagcagtcctgcagcttggtgttaccatggattattccattttcctgttgaacagttatgaggagaataagaagcggtttgagggtgataaagagagggctatggcacatgccatcaatgcaaccttcaaatctgtaatcggaagttctattacaacagtagccggatttatcgcactttgctttatgaccttctcacttggacgtgatatgggtatcgtaatggccaagggagttgttatcggtgttctgtgttgtgttactttgctccctgctctggtgcttacttttgacggagccattgaaaaaacaacacataagccgctgcttccaagctttgataaggcatctgcttttattacaaagcattataaagtatggctgatcattttcctggtaatgcttttcccggcaattcatggaaataacaatctgaagaattactacaatattgacaagtcacttccttccacgctggacagtaatgtggcaaatgccaaacttcaggaaacctttgatatgaataatgttcatatggtgttattaaagaaaggtctgacatcaaaagaaaaaacagaaatgcttgaccagatcaaggatgttgatggtgtaaaatgggcacttggaatggactctttcgtaggtgcggcattcccggataccatgatcccaagtaatctgaagaagatgctggaaagcgatgagtacgagatggaatttatctgttccaaatataaaacagccacagacgaggtaaacaatcagattgatgagatccagaagattgtaaaaggatacagtccggaatctatggtaatcggagaagcacctctgaccaaggatcttcaggatgttacggatgtggatttaaagactgtaaatactatctctatcctggcaattttcattattatcatggttgtgtttaaatccatttcgcttccgtttattctggttgcagttattgagtttgcgatttttgtcaatatgtccgttccttattatcagggaaaggaagtggtgttcgtagcaagcattgttatcggttgtatccagctgggagctactgttgactatgcaatccttatgaccagcagataccagaaagaacgtggtcttggaaagagtaagaaagaatccattgccatcgcacataaaacttccatgaagtcaattgtgatcagtggctgcagcttctttgcggcaactttcggagttggtctttatacacaggtagatatgatcggaagtatcacaaacctgctttcacgtggagctgtgatcagtacactggtggtattgtttatacttccggctatgtttatgatatttgattctctcatctgccacacatctattggatttgcaaagaagaaaccggcaaaagagaagaaacagtgattcaggatttttaaaaagaagcttattgtaaagagatagaataaaggagtaagttattatgaacagaaacagaaagaaagcagctgcagcaacgcttgcagcaggaatggctgtagttctcggagcaggtactgtaatggcagctgcttcaacaggtgataatggattgcagaaagaagaaaccgtttatgtaaatacaactgccggaggagaagtaacggatgtcacagtatctgactggctgaaaaattccggagacagttccaattctgaggtgaaagatgcctctgatcttcaggatataaaaaacgtaaaaggtgatgaaacatttactcagaacggaaatgatctgacctggagtactgatggaaaggatatttattatcagggaaagacagagaaaaatctcccggtttccgtaggaattaaatattatatggatggaactgaggtttctccggaagctctggcaggaaagacaggacatctgaaaatggaagtgacatatacaaatacttctaaaacaaccaaaacagtgaatggcaaaaagactgatatttattcaccctttgttatggtgacaggaatgatcctttctacagataatttctccaatattacagtagataacggtaaggttatttctgacggaagcagaaatgttgttgtcggttttggtatgccgggaatgaaagaaagtctggatatgtcttctgatattgcagatgaagtgaatatccctgaaggatttacagtggaagcagatgttacagactgtgagatgaattctacatttaccgtagcacttacagatattttcaaagatattgatctgaatgatgtggatggactggatgagctgaaggattcaatgaaagatctgacggatgcagcagtaaaactggtagacggaaccaaagatctttatgatggaactaataaactcaatgacaaatataaagaattttatgatggaatcggaactctgaaaagtggtgtcagtgatctgaatgacggagcaaaagaactggatgacggagcaaaggaattaagcagcggagcacagacactgaatacaggggcacagactttaaacagtggtgtttcctcttatacagcaggggcagacacactttcagatggaatcaaacaatatacagcaggagtagatacgctggacagcaagatggctgaatatgaggctggaatgaaatctctttccgatggtgtaaatgcatatgttgcaggcggcaatcagcttgcaggcggtgtgcagagttatgtaacaggaacaactactctgacagacggaatgcagcagtatattgcaggagttaatcagcttgcaggcggtgtgggtcagtatgctggtggtatcaagagtttagtggatgggattggtcaggttgttccgggaattgatactgctgtaaatggaatccagactgctgtagaaaaaatgacagctctttcatctaaaatcgatgcaaatcagattgctaatttcagtgacagcatgacggcttatacaacaggcgtttctgattacacttctgcagttggccagtatattgaaagtgtagaacagcttgcatcaggactgagccagcttgagagctcacttaaaaacatgggagcttccacagcttcagaaatagaagaaagtgcaaatgcaatgtccggacagttaaatgacagtgctgaaaccatgaacagtcaggcagatgcaattgaatcctggatcagtgattccgcagaggcttctgtagatgcatcttctgtagatgcaggagttgcagcagttagcagtcagctggaagcagcagaatctgctttgtataatattgataccagcaatatggatgatgaaacagcagctgctgtagaagccgcgattgatggtgcgttaggttctattcaggcagctgaggacagtgcatctaatattgatacatccacaattacagcctccgcacctgatacgtcagcattgcagtcagcagcagacgctttaagggcatctgcgtccagtgcagaatcaacagcagatgcacaggaagaggcagtcaacagcagtgttgaacagatgaaacagcaattacaggcattaactcagggaatgcagacagtgcaggagactgtatcacagttaaatgcaggtgcaaaagagcttacttctaatgatggcacattaaaagcaagtggaacccagcttgctcagtcaggaacccagattgctacagcagtaaatcagatgagtacattatttaccggacttggacagcagcttccggaaatgctgcagggaatcgatcagctgaaagcaggctctgatcagctgactactgcaaataaatctctccagagtggatatgaaagccttgcaaaagcaagcacagaacagatgatttccggcgcagatacactgcttagttccggaaagacactgacagatggaattgcacagcttcagggcgaaaataatgttaatgcacagacactgttaaaaggagccaagactcttaagagcgcaagaaagagcctgaccagtggtatgtctcagatcaattctgcaacaggtcagattacaagtggtgtggaaactctggcatctaacagtggaacactgtacagcggagcagatcagctttcttcgaacagttctacattaaacagcggagcatctaagcttgcatcaggaacccagacacttgtatccggagcacagacccttgcatcaggaacaggcagccttgtatctggcactcagacattaatggatggtgcagataagctttctgatggcagtgatcagcttaaagatggtatcagcgatctgaatgacggagcaaaagaactgaacaaaggacagaagaaattctataaagaaggtattaagaaactggatgatacagtaaacggagatcttcaggatattcttgacagatttgaggtaatccagtctgacgatgtaatgtacacaacattcacagacaaatccggcgatatggacggaaatgttaaatttattttcgaatctgacccgattgaaatcagtgatgatgagaaatagatatcataaacctgagacatacagaataagggaaagatgaacagccagacttatttaaaatggggcggatgcaatcaggcaactgccccattgcttatgaaaaagctttctgttataataaaaaagtcagatgggaattttagaaaacaagaaagcatcaggtgattaaatggaaaatacaaaatcacaaaaaaagtcgtattcaacagcatcttccaagagcagggcgcgtcgaaaaacaaaaacagattattatgattacagtctggtagcagttattgtactgctgacctgttttgggcttatcatgctgtacagtacaagctcctatatggctcagataaattacggaagcgacatgtatttttttaaaaaacaggccatcatcagcgtggcatgtattatcatggcattgatcatttccaggctcaattatcggatactgaaccgttttagcacagctttgtatgtagcggcactggtgttgatggcactggtaaaaacaccgctggggcagtcttctcatggtgcccagagatggctgaatcttggaccggttcagttccagccggcagagcttgccaagatagcagttattgtctgcctcccatatatgatcgtgcatatgggaaagaaagtccataccttaaagggctgtatggttcttgctgttgtgggaggcggactggcactggctgcatatgtatttacggacaatctgagtacagcaattattattttctgtattactgcaggactgatttttgtggctcacccggatattaagatttttattattattgcaggtgttgttattgcgctggcagtgatcggagtcatttttctgaatgcaacagtgagtgttgatggaagtggaagctttcgtctgagacgaatcatggtatggcttcatccggaagaatatgcggacagttgggggtatcagacaattcaggcattgtatgcgattggctcgggaggattttttggcagaggacttggaaacagtattcagaagctgggaagtgtacctgaggcacagaatgacatgattttttcaattatctgtgaagaactggggatttttggaggtcttatcgtgctgatgctttatgcatatctgttatacaggctgtttgttattgcacagaatgcaccggatatgtttggctcacttatggtcagtgggatttttattcacatagcattgcaggttattcttaatattgcggttgttgtaaaccttatgccgaatacaggtgtcactcttccgtttatcagttatggaggtacgtcgatcgtattccttatggcagagatgggacttgcgctgagtgtggcaaggcagattaaatttgaggaataaaaaatgtaataaaatagtgcttgacaaacaggagggaagaatatatactttgaacatcaaagtaatcaatcccgataaaaccaaatctgaataaatgagacgtatttactggtctgacggatgataaggttgaaaacaagaaaaagcagaatcatcatctgcttaacaaaaataataaaaaacaagtgataaccggagcaggaaaaagagaagcattccggggcttgaattaaaggagaagagaaaattatgttagaaaaaatgagtgaaatgatcgcagagcagttaaattgtgatgcagcaggaattactgctgaaacttctttcaaggatgatcttggcgcagattcacttgacctgtttgagctggttatggctctggaagatgaatacaatattgagatcccggctgaagatcttacagatttaacaacagtcggagctgttatggattatctgaaaaacaaaggcgtagaggcttaatcatatagaaatgataaataactccttggagccagagatggcttcggggagaattttttgacattataatttgaatatcaaaatattttaaactaaaataatttgcaatcagaaacaaattgttatcatctgatataaacataaaaataaaggaaaggaaaatgatatgtctaaaattgcatttgtatttccgggacagggtgcacagtatacaggaatggcgaaagatttttatgaaaaatatgctgtaagtcgcgaagtatttgaaagcgcatcaaaagcatccggacttgatgtgaaagctttatgctttgaagaaaatgacagattaaatattacagaatatacacagattgccatgctgacagcagaaatcgcaatcttaagagctgtagaggaagccggaatcaggtctcaggtaaatgctggactgagccttggagaatacggagcactggtggcctccggtgttatgaaggaagaggatgcatttactgtagtgcgaaaaagaggaatttttatgcaggaggcatatcctacaggtggtgcaatgtccgctgttcttggaacagatgcagagctgattgaaaaaatctgcgatgagacacagggaattgtatccattgcaaattataactgtccgggacagattgtgatcacaggcgaggagacagcagttgcagcagcaggggaggcattaaaggcagcaggcgccagacgtgtgattcctcttaaagtcagtggtccatttcactgtgagcttctcaaaggcgcaggggaaaaactgggacaggaacttgagaaggtagaaatccagtcatttacagtaccttatgtgacaaatgtaactgcacagtatgtgacaggaccggagcaggtaaaggaattgcttgtcagccaggtttcatcctctgtgcgctggcagcagtgtgtagaacagatgattgatgatgatgtagatacttttattgagattggaccgggaaaaactctgacaggatttctcaaaaagatcaacagaaatgtaaaagcattacatgttgagaaaacagaagatctggatgaagtgagaaaggagtgtctgtaaaatgctgaaaaataaaattgccctgattacaggtgcaggacgtggaatcggacgagccattgctattgctcttgcaaaggaaggtgcagaggtggttatcaattacaatggttctgaagagagagcgaaggaagtaaaacagaccatcgaagaaaacggtggaaaagcttccatgtataaatgcaatgtcagtgatttcgcagcctgtgaagcaatgattaaagatataattaaagaatacggacaccttgatattctggttaataatgcaggaattaccaaagatggtctgattatgaaaatgaaagaagaggatttcgattctgtacttaatgtaaacctgaaaggcacattcaatacaatccgtcacagtgcccgtcagatgctgaaacagagaagtggaaagatcatcaatatttcttctgtttccggaatcctcggaaatgtgggccaggcaaattatgctgcatccaaagcaggtgtgatcggtctgacaaaaacaatggcaagagagctgggcagccggggaattacggtaaatgccattgcacccggatttgtagacacagagatgacagaagtactctcagaagaaatcagggaaaatgcatgtaagcagattatcctgggacgtttcggaaagcctgaggatattgcaaatacagcagtatttctggcatcagacaaagcagactatattacaggacaggtcatcagcgtagatggcggtatgaatgtataaataaggagaacaaaatgagaagagttgtaattacaggtatgggagcaatcactccggtaggccttagtgtagaagaattctggaacagcgtaaaagaaggaaaaacaaactttgcagaagtaacacgttttgattccacaaattacagagcgcatatggcagcagagatcaacaattttaatccaaaggattatatggatttcaaatctgcaaaacgtatggagcttttcagccagtatgcggtagcagcagcaaaagaagctattgagcagtccggactggatatgacaaaagaagatcccttccgtgtaggctgtagcgtgggaagcggtatcggaagtatgcaggttgtagagaaatcctgcgaaattctcaacacaaagggaccaggaagactgaatcctctgatgattcctcttctgatctccaatatggcatccggaaatgtttccattcagtttggactccgcggaaagaacattaatgttgtaactgcctgtgcaacaggaacccacagcattggagaagcataccgtactattcagtgctctgatgcagatgttatggttgcaggtggaacggaagcagctatcacaccaacaggctttggtggttttgcggcactgacagcattgacctcatccacagatcctgagagatgctccatcccttttgacaaagaaagaagcggttttgtaatgggcgagggtgccggcgtggtagttctggaagaactggaacatgccaaagcacgtggagcgaaaatccttggcgaggttgtcggatatggtgcaacaggagatgcttaccacattacatcccctgcagaggacggttccggtgctgccaaagctatggaatgggctgtaaaagaagcaggaatttccacagatgatgtatggtatgtaaacgcacatggtacaagcacacatcataatgacttatttgaaacaattgccattaagaaaacatttggtgaacacgcaaaagaaatgaaaataaattctacaaaatctattacaggacatcttctgggagctgccggtgcagtggaagtgatcacctgtgtaaaagaacttcaggaaggcctgatccatcagactgttggttataaggtgccggatgaacagtgtgacctggattatgtaggaaacggtaatgtaaagatggatatcaaatatgcacttaccaattctcttggctttggcggacataacgcatccttacttattaaaaagtacgaagactgatcacgcagataataaatggtatggtgattttgaaaacaatatacgacagtgatcttataatatagctatttcagcaggaggaaataaatggaactggcaaatatattagaactgatccacgcagtcagcgattcagatctcacagaatttaacctgcaggacgataccttaaatatttccatgtcaaaagagaaaacaattgtacagcagatggcagtcaatactgatccggcagatgctcagcagtatcagccggtagtgcagcaggctgtacatgtagaatccgtcaatgctgttaacgatgaagtacagacaggaagtgtggtaaaatctcctcttgtaggtacctattatgcagcatcttctccggaaaatcccccctttgtaaaagtaggagataaagtaagcaaaggtcaggtccttggcattgtggaagcaatgaagctgatgaacgagattgaatcagaatttgatggtacagtaaaagaaatccttgtagaaaacgagcagatggtagagttcggacagccgatgtttgtgatagaatagaagaaggaggtaaaaaactatgaaacttacaacaaaagaaatcatggagatcattccccacagacacccgttcctcctgattgatactattgaagaactggtgccgggtgtgaaggcaacaggaaagaaatgtgttacctataatgagccgcattttgcaggacacttcccacaggaaccggttatgccgggagttctgatcgttgaagcgcttgcgcagacaggtgcagttgcaattctgagtaaaccggaaaataaaggaaagatcgcatactttgcatcgatcaacaatgcaaaattcaagaacaaggtagttcccggagatacccttactctcgaagtagagatcattaaggaaaaaggtcccatgggagtgggaaaagcaaaggcaacaaaccaggacggtaaggtagcagtgatcgcagagctgacttttgcagtaggagcataacagatgtttaataaaattttgatcgccaatcgtggtgagattgcagtgaggatcatccgggcatgtcgtgagatgggaatccgcacagtagccgtatactcagaagcagacagagatgccctgcatacccagcttgcagatgaagcagtatgcatcggaaaggcacagtcatcagacagctatctgaacatggagcgaatcttaagtgctaccattgccacaaaagcagaagcaatccacccgggattcggatttctctcagagaacagccgttttgtggaaatgtgtgagaaatgtaatgtggcatttattggtccttccgcagaagtaatttccagaatgggaaataaatctgaggcgaaaaacacaatgcggaaagctaaagtcccggtagtgcccggcacaaaggaaccggtctacacagtagagcaggctttggaagctgtaaaggaaatcggttttccggtcatgatcaaagcatcagcaggcggcggtggaaaaggaatgcgtgtagccggaaatgaacaggaatttgccaaattgtttgagacagcacagcaggagtcggtccattccttctctgataataccatgtatctggaacggtttgtggagaatcccagacatgttgaagtgcagattcttgcggataaatacggaaatgtagttcatctgggagaacgagactgctctgttcagagacgtcaccagaaaatgatcgaagagtctccatgtatcgcaatctctgatgatctgagaaagaaaatgggtgagacagcagtacgggcagcaaaggcagcaggctatgaaagtgcaggaaccatagaatttcttctggatcagtccggagaattttatttcatggaaatgaacaccagaattcaggtagaacatccggtaacagaatttgtgtctggtgtagacctgatcaaagagcagatctgcattgcggcaggtgaaccgttaagcgttcagcagaaagacatagaaatccgcggccacgccatggaatgcagaatcaatgccgaggatcctgagagacatttcatgccatgcccgggtaagatcactgacttacatcttcccggtggaaacggaatccgcgtggatacagcagtttataatgactacgcaatcccgccctactatgattccatgattgccaagatcattgtctatgacagagaccgccgcagtgccattcgaaagatgatcagtgcacttggagaagttgcgattgaaggagtaaagaccaacgtagatttcttatatgagcttctcaatcagccggattttcaggagggaaacattacaactgatttcattccacagcattatccgaacctgtaaaagaaaatctggtacaaatatattttatagttcagtagaaatcacatatttattaaaaggtaattgataagcgaatcgataaaattattttgatagaattagtttgattaatagttattaacgtcattttgttgtctgaaagcaacatcaaattgggttacatgaaggagcaggattttaatggcagacttaaagagattttttaagaaaacagtttcagaagaccggcataaacaggccgtatctgtttccgtacctgagggtttatggattaaatgtccaaagtgcggagaaatggtttacagagaagacgtaatatccaacgcctatgtgtgcccgaaatgcggaggatatttcagaatcagtgcgaaacgtcggatcaaaatgatcgcagataaaggaagttttaaagagtggttcacaggaattgacaacagcaatccactggactatccggattatccgcagaaaattgaggatctgagagaaaaaacacaccttgatgaggcaattctcatcggagaagccaccatcggaggaatccgtacagtgatcggagccatggataccagatttctcatggcttccatgggatatgtggtgggagaaaagatcacccgctcatttgaagaagcaacaaaacagggacttccggtcattctgttctgttgctccggcggtgccagaatgcaggaaggaatcgtatcactgatgcagatggcaaaaacctccgcagccattaaacgtcactcccaggcagggcttctctacacatctgtgctgacagacccgactaccggtggcgttacagcaagctttgccatgcttggagatattatccttgcagaaccaggctcactgatcggatttgccggcccgagagtcattgaacagactataggtcagaaactgccggagggcttccagagaccggaatttcttctggaacatggatttctcgacggaattgttgaacgaggctctatgcgggatgttctttcgctgatcctgaaactgcatgataccagaaaatgttacggagaatttccacaggaaacatctgccagatctttcgatacttttggcaaaaagaaaaagcagaagaaacaaaaaaatctcacagcctgggacagagtccagattgccagaagcagtgaccgtccgtcagcagcggaatatattgatgccatttttgatgatttcatggaatttcatggtgacagaggtgtcagagacgacaatgccatcatcggcggcattgctacactggacggacagcccgttacagtaatcggaatccgtaaagggcatactacaaaagaaaacatcagatgtaacttcggaatgccatcaccggaagggtacaaaaaggctcttcgactgatgaaacaggcagagaaattcggacgtgcagtcattgcatttgtagacactccgggggcattctgtggactggaagcagaagaacggggacagggcgaagccattgcaaggaatcttctggaaatgtccgatttgaaggtgccggttctttcggttgtaattggtgaaggcggcagtggcggtgcacttgcacttgcagtcggcaatgaagtctggatgatggaaaatgcaacctacaccatcctttcaccggaaggctttgcatccattctctggaaagacagcagaaaggcaccggaagctgcggaggtcatgaaagtaacggcggctcatctgaaagaactgggaatcattgaacggatcataccggaggaatatcctgcaagtgaggagaatttgccggaaattgcagaatatatgaagatcagaatgaagcagttcctggagaaacaagctggtaaaagtggggaacagatcgcacaggaacggtatgagaggtttcgtaagatgtagcgtgtgaatggcaaaagggacgcgcagaaaaatattttatttggagtgcggtttcggggtctaagatattctaagctctcagaaatctgctaaaggcatgagccgtcttgtcaaactcgctccgttgcaaacttcgctcagacagtgatgcagccggctcataacgcagatttctgagaactaagaatatctaagacccctgcaaatgcactccaaataaaatatttttctgcgctgttttgttgcaggttgtcatgcactttcttagggtttatatttatagtaagtctcttaattgatgtatttgagacagttcagcagagtgcgaaagacaaggaagatatctgcaggcgtgctgacgcacgtcaaggatatctgacgcaggatttcatgcctgatgggctgaatcaatatgcattatttatgagggttactatagttatgttgtgtagcagatatgttatttagctaattgttctgtaaagtcaggagtggtatattctttattgttgtatactaaatatgttatatagccgatagtcagcatgggaagcaattatgtttgggggcgaatttgagggttcattgtagttcttggtatttgggaagccgcgttatgagccgatcgtttcactgtctgagcggagtttgcaacggagcgagtttgagagagcggctcatgattttagcggcttcccgaatgcctagaaatacaatggttccgaaactgagcccccaaacataattgcttcccatgcgtccctttccataacaaacttttttaaaatttccaatatcccgacttgaaataagaaagcctctgacgtataataaacccgaaagtagaaaggcgctgcttttaagcagggtctttttttacagattttgaatatataaaaaattcaggagtgaaaaaagttatgaccaagatcagaacaagatttgcaccaagccctacaggcagaatgcatgttggaaatttaagaacagcattatatgcataccttattacaaaacatgaaggcggagatttcatcctccgtattgaagatacagaccaggaacgttacgtagaaggcgctgtagatattatctaccgtactcttgcaaaaacaggacttctccatgatgaaggtccggacaaggacaaaggctttggaccgtatgttcagagtgagcgtcaggcacagggaatctatctgaaatatgcacagcagttagtagaacagggtgatgcatactactgtttctgtaagaaggaagaactggaaggtatgaaacgtgttgtggcaggaaaagagatttccatttatgacaaacgctgccttaaactttccaaagaagaagtacagcgtcgtcttgatgcaggagaaccacacgtaatccgtttcaatatgccaacagagggaactacaacattccatgatgtaatctacggagatatcacagtaaacaatgaggaactggaagatctgatcctgatcaaatctgacggatacccaacttataactttgcaaacgtaatcgatgaccatttaatggagatcacacacgtagtaagaggtaacgagtatctttcctcagctccgaaatacaaccgtatctacgaagctttcggatgggatatcccggtttatgtacattgtccgctgatcacagatgagacacaccagaagctttccaaacgttgtggacattcctcttatgaagacctgcttgatcagggatttgtttcggaagcaatcatcaactatgtggcacttctcggatggagtccttctgacaacagagagatctttacactggatgaactggtacaggtatttgattatcatcatatcaataaatctccggcagtatttgatattgcgaaacttcgttggatgaatggtgagtatatcaagaaaatggatgcggatgaattctatgagagagcacttccgtatatgaaagaagttctgaagaaagactacaacttcaaaaagattgcaggaatggtacagaccagaatcgaaacattccctgacattccggctctgattgacttctttgaggaagtaccggaatatgattccgccatgtactgccataagaaaatgaagacaaatgaagagacttctcttacagtattaaaagaagtacttccggttctggaagaacaggaagattatacaaatgatccgttatttgaaacattaagtgcatttgtaaaagagcatggttataagaacggatatgtaatgtggcctctgcgtactgctgtttccggcaagcagatgacgccggccggtgctactgagatcatggagatcatcggtaaagacgagacaatcaaacgagtaaaggcagctattgagaaattaagcaaataaatatgaagagaaatccatctcaacttcgggcaatcactcacctgtcaggacctatgatggtcctggcaggtcccggctcggggaaaacttccgttattgtggagagaactgcatacatgatcaatgaggggaagataccggcttcttctattttggttgtaactttttccagagcagcggcaacagagatgaaagaacggtttttgaaattcgtgggacagaacagaagcgaagtgacttttggaactttccacggaattttttatgggattttgaaagcggcctatcatctgagtgcggccaatattctttctgaggaagagaaattcagtattctacgtgagatgactgagaaatatggacaggaaatggctcaggagggagatttcattgaagaagttgccagggaaatcagtgtcgtaaaggggaactgtatttctccggagcattattatgcatcctgttgctcggacgagatattcagggacatttttcatggctataagcaggctctgaaggcgaaacgcaagctggattttgatgatatgatcctctgttgttatgaacttttttcccagagacaggatatcctgaatgcatggagaagaaaatttgtctacattctggtggatgagtttcaggatatcaacagcttacaatacaagattttgcagatgctggcggcacctgtcaataacctgtttattgtaggggatgatgaccagtccatctatcatttccggggcgcaagaccagagattatgttaaattttacaaaggattatccgaaggcagagacagtccttctgaatgtgaattaccggtgcagtaagaatatcctgcgtacagccatggaagtgatcggatgtaataccagacgtttcaaaaagcagctggatactccaaatgaagaagggatgcctgtgacgtgcaaggaatttgataatccaagagaagagtatatgtgcgtggtggcagcactgaaaaaaagaatggagcgcggcgaggatctgctgaatacggcaatcctgcttcgtacaaatcaggaatcggaaggtctgatcaatgtgctgatggaatatcaggttccttttacaatgaaagaacagcttcccaatcttttccgccactggatctgccgggcgcttctggcttatcttgaaatggcagcaggagacaggagcaggaagaatttgctggagatcatgaaccggccaaatcgctatatttccagagaagcgttgaacagttcgcagattaattttaatgaacttcgggaatattataaagacaaagactggatgtgcgacaggattaccacactggaaacgcatctgaggattcttggtactctttccccttttgctgcgattaattttatcagaaaaggaatgggattcgaagaatacttgcgtgaatatgcacagtatcgtaaaataaaaccagaggaactgcttgagaccctggaccggatccatgagagtgcaaaaggcatgaaaaccctggcgaagtggcaggcttacatagaagaatatacgaagcgcctgaatgaacaggcaaggaaacagcaggataaaaaagaaggagtgactatatccacactccatgcggtaaaaggtctggaatatgatattgtgtatattctgaatgttaatgaaggaagtattccatatcgcaaggcggttttggcagaagcagtggaagaagaacgaagattgttttatgtagggatgaccagggcgaaaaagaagctggtgcttgcctatgtgaaacgccagtatgagaaggaacgggagccttcccggtttcttgaggagacaggcctatgaataaaggaattatttactgtacaaaaatacgggaagaatatgaaggcgcacatatggagcatatgatcgcagagaaacttctggaaatcgcactgaaaaaagaatatggaatcaatctgtacaatgaacccagagcagagggagaacatggaaaaccattcctttcctatcgtccgtccctgcattataatatcagtcattccggaaaatatgtggtatgtattctggctgatcaggaggttggaattgatgtgcagattcattgcagagccaattatgaaagaatgctcagacgtatggtaccccgggaacagtatctggaaattctctcagatataaatgtggaaaagaaattttttgaacagtgggtactgagggaagcttatatcaaatggaccggtgaggggctttccagagacatgaggactatatccatggatgaaggcagtcatatgctgcttgatatggaggacggttacagtggagcagtatgggcaatgaatcccatggaaatcaactggaaatatgaagacatcatacttgggtaagacatgaacagacaaacgaagaaagaaatccggagactggcagtgaagattcttgtagcagtactggcacttggactggctttctggggatatgctttcgtatacaggggtaagacggaacctcctgcaaaatatccggtaaccaaccaggatgctgcagtgtattcattacgcggacagatacagatgctgtcgcagcaggaggagttaaatacctttgcctttgagggcagaaaaaaagaaaaagagtacggaacttatattattcccggactgagatatacaagaacattcctgaatgcagagggtacaaaacaggcggtatgtacttccatgactcctcagggacttgcagtgaccgatgagtatgtacttgtaagtgcctattgccatacggaaaaacataactctgttatttatgtgatcaacaaagaaactcacagatttatcaaagaggtagtcctgccaggtctgcctcatgtaggcgggcttgcctatgatcaggaacatgatatgctgtggtattcttcaaataccaatggaatcgcacaggcgatcagcattaagatggatgtgctgcgtgactataattatgcggataaccatatgcctgtgcaggtaaatcagacatgtagtctttatggaatcgtgagagattcttttatgactttctataaggggtgcctgtatgtaggatgttttaacaaatatacagagagcaccatcgcgagatatgcggtggattcaaaaggtgatctggtgaatacttttaatgaggaacttggcatgatgtttgaaatggcggttccgctggattattctacaatatcagaacaggcacagggaatggctttttataacgataagctgttgttgtctcattcttttggtattctgccatccaggattgttttttatgaacagtcggataaacgtctgtatgtcaatgaaaattctgcaagatcatacagaatgcctgagatgatcgagcagattgttgtagaaggggatgaactttacgtactctttgaatcaggagcttatgcgtacagggggtatgcaggaaatgtggtagaccgggttctgaagctgaatctgataaaaatggaagagtcttatcaggaagagtactaaaatcggtttgtccacatatattaagtgtaaagaggtgagacatatagaagcgcagcagattgaaaacctgtttgccggaaatatccggaatcttttaatggatgcgaagctggattatgataaattatatgagatacgccttcgtgtagggcgcccgttgtttttaacttatgacggaggagagtgttttctgcgaaaaccgggtcaggaacagtatctggtgacaacggaagatctgaaagaaacactggaatatgtcacaggatattccctgtatgcttatgaggatgagatcagacagggatttatcagtgttcagggtggtcacagagtaggtgtgaccggaaaggtagtgttggatcggggcaggatcatgggaatgaaatatatttcctgcatcaatgtccgtctggcacatgagattcagggatgtgcggataaggtgatgccttatatccgtacagagaaatgggttgcaaatacattgatcatttcaccgccaaggtgtggaaagactacgctgctcagagatattatcaggcagctcagtaatggatgggccaatacccagggtctgacaataggtgtggtggacgagagaagtgagctggcaggctgttatcagggaattcctcagaatgatctgggaatgcgtacagatgtgctggactgctgtccgaaatcagaaggtatgcagatgctggtccgttccatgtcaccggatgtggttgcagtggacgagttaggctgtgaagaggatttcaaggcagttgactcagtgatccattgtggatgtaagctgattgcgactgcacatggaagctgtctggaggatgttctggatcagccattcttttataagcttatgggcgagaaagtatttgaacgttatattatcctggacaaaaatgatcaggcaggatgtctgaaagctgtattagatgaaaatggaaaagtatgcttagaacagtaggattgtgtgtaattgtaatttccggtgtcggttgcggttttgccatgagcaatgaacttggcagacgcaaaaagatgatggaaatgatcttacggatgatcatcctcctaagaggagaaatacgttatggaaataaatctctgtacgatgcctttacaggtgcttccgggaaactggaagggaagtacagagaattttttatacttacggcacagaaaatgaaagaaaaaacaggggattcctttgggacaatcttcagagaatcggccggaaagtgtctggatctggattgtcttttgcaggaagagagagacagattttattcactgggagatcagcttggttatcttggactggatatgcagctaaaacagatggatctgatggaaaaggaaacagaatatgcgatcagggaactcaggaaagatttttgtgaaaaaagaaaattataccgcagtatgggaatactgggcggaatatttgtggctgtgtttttttggtgagcatgtatttataatctgtttctttactgtgtagattactgttttgttatatctggcagcagaagccggaaaggagagactgtggaggtaagtcttatttttaaaatcgctgcagtagggattctggtttctgttctctgccagatcctaaaacacagtggaagggatgaacaggcatttctggtaagcctggcggggcttctgatggtgctgttctggattgttccatatatttatgaactgtttgaaagtattcagcagttgtttgtgctgtgatttcaaatcaactgttatggcagttgacagaacagaaagaggtttgaatggcatggatattgtgaaagtttcaatcatgggtatctgcggaatgatgcttggttttattctaaaagaaaccagaccggaatttgctgcacttgtgaccatgatgacgggttttctgattcttggtcttgcagcaggaaaagtttcttatctgtttgaaaccatgaacaggctgagagaaagcttccccatagacagcagttatctcacagttctggttaagattattgggattacatatatcggacagttttcatctgcaatctgcaaagatgccggatatcagatgatcggaacacagatcgacctgttctgtaaactgtctgtgatggttctgagtatgccggtactgctggcaattctggatacgatttcggagtttatgatatgaggcaggataaagagagaagtatcagggaacaggcagatctgtggaaaggttactggtgtatactggcatgtatacttttggtgggaagagtgtcatatcttacattctttcagaatcatatagtatccgtatatgccgctgcgcagacagaacagaaagaagattcttcagtacagatcctgcaggagaatctaatggaagagatacagattgatgatgtgcagaaaatgttggatgagattatggatgaccatgttttttctgtcagagaagcactgatgaatatcataaacggggaggatcctgtttcaaaagagactgtacggagctttttgtatagtctctttttttcggatatagagaatgaaaaaggattaatactgaaacttttacttgtgatttttattgcagcggtgctggcggagtttgctgatgttttcggaaacggacaggctggcagtatcagcttttatattgtctatcttgcgctgtttacaatgcttatggagaatttctcaaggcttggaagtacgcttacaaactggcttcttggactgacggatttcatgaaagttctgtctccggcttattttatgacagtggctgcatcaaccggatcatcaacagctgctgcattttatgaaggaattttgctgatgatctgggcggttcagtggcttcttgcaaatctgtttctgcctgctgtaaacctgagtttgcttctgaaaatggttaattatttgtcaaaagaggagatgcttacaaaaatggcagaacttttggatgtagctgtaaactgggggttgaaaagtcttctgggagctattgttggtctgcagattgtgcggaatatggtgagcccggtgatggatgccatgaagcgttctgctgttggcaaggcagcgagtgcgattcccggcattggaaatgcagtgaccgctgtaacagaattagtgctgaccagtgcagtgatggtgcgaaacagttttggcgcagtaatcgtgatccttctgttgctgattggagcaggaccgattatccattatggaagtctttctctggtttatcgttttctggctgcgattgcacagccaatttctgacaaaagagttgtgggagccctgagtacaatgggggagggatgtgcaatgcttttaaagcttttgctgacagcagaagtactttgcatgctgacattcctgatagttgtagtttctgtatcctgatgaactgacagaaagattgccggaggaaacatatgaaagaagagctgtatttatggattcgaaatctggcagtattttatatctttttcactgcggttctgaatctgatacctgaccagaagtatgagaaatatgtacgcttttttatgggcctgctgctgatttttatgatgagtaccccgatattttccattcttggaaaaggttcggaactgacggaaagttttctggataatttttctgaagaaaacagagagaaagaactccgggaatttcagaatattcagaaagtctatctggaaaaaggttacgaactggaactggaacagaaaatccgggaaactctggaaaaaagaggcatagaagtatataaggtgaaagtaaatatagaaggggaggagacgcaggcaaaccttgtactgaagacagaaatttctcaggaggagagaaaggagcttaaagatgcgctggtggaagagtggggacttaaagaaaacagaatttgtatccagattgtccgaaatgaatccggcaaaatggggaatcctgttgctcatcggagtacttctggcagtagcggcgatgcctgtatccagtaagcagcaaaagaaaaatacggcaggagagcagagtgaagatatgcaaaaaagtgttctggaagagaaacttgaagcatttcttgaaaatacggaaggggtgggaaaggtacaggttatcctgatgacagatgagaagaaagacaggcagagcttctataattcagaaaccatacaggtgaccggtgttctgatttctgcggaaggtggaggaaatcctgtagtggtccaaaatattcaggaggcggtcatggcattatttcaggtggatgctcatagaattagaataatgaaaatgaaatgaggagataaatgtgaaaaaagtcatcggaaaaaatcaggtcattattacatcgctggcaattctgattgcagtggcaggatatctgaactttgcggatgtagatcttggattcagggataaggaggcaagtacggacagcagcagtatccttgaagatgcaggatatgatcttacagatgaaactgctcttctggatgaaaatcaggcagatggaggtctgactgataacagtcttacagacagtcaggaaacggatactcccggggaggctgtgtttacgggttctacaggatttgccgcacaggcaaagatcagcagagaacaggtgcgctcacagaacaaggcagatctgcaggacattatcaataatgaagaaattgatgatgaagagaagcaggaggcaatacatacgatggtctcgatgacagacctttcagaaaaagaagcggcagcagagcttttgctggaggcgaagggctttaagaatgtagttgtaaatcttaccggagaaactgcggatgttgtgatccctgaagcagaactttctgatgcacagagagcacagattgaagatattgtaaaaaggaaaacaggaattgcgccagaaaatattgtgatcaccccactgaaggagagtgaagatgcagaagatacaacacagacagatgaaacatcagcagatacttcgtatgaggaagacagcgaaacatcagcacagccatatgaggataccgcaatcgatacaactgatatttatgactgatattttgatatgaatatgcgaacatatatcttgacagaaaagaggtgcatatactagaataggaatgctgtaaaaaaatagaaaacgtaactgataccggctgttgccggtgttttatgcaaacaattataaaaaaacgcaacaggaggctgaacgtgtctaagtatacgaatgaaatagaaaaaagaagaacatttgccattatttcccatccggatgcaggtaaaactacactgactgagaaattcctgctgtatggcggagcaatcaatcttgccggaagtgttaaaggtaaggcaacagcccgccatgcagtgtcagactggatggagatcgaaaaagagagaggtatttccgttacttcctctgttctgcagtttcattatgatggttactgcattaatattctggatacaccgggacatcaggatttctcggaggatacttaccgtacactgatggcagcagattctgcagtcatggtaatcgacggttccaagggtgtggaggcacagaccagaaaactgttcaaggtctgcgtaatgcgccatatcccgatttttacatttatcaataagatggaccgcgatgcaaacgacacatttgaccttcttgatgagattgagaaagaacttggcatcgcaacctgcccaatcaactggccaatcggttccggtaagaaattccgcggtgtttatgaccgtgatacagagaaaatacttaccttttctgatacacagaaaggtaccaaagaaggtgtgatcgaggaaatcccgttaagtgacagccgggcagatgagattatggatccggagcagaaagcacagcttctggatgagattgagcttctggacggcgcaagtgcagattttgaccaggagctggtaagcaaaggtaagctgacacctgtattcttcggatctgcgctgacaaacttcggtgtggaaacatttctggaacatttcctgaagatgacaacatcaccgcttccgagagtgtctgatattggggaaattgaccccatggatgatgatttctcagcgtttgtatttaaaatccaggcaaacatgaacaaggcacacagagacagaatcgcatttatgagaatctgttccggtaaatttgacgcttcccaggaagtatatcatgtgcagggtgataaaaagatgcgtctgcttcagccgcagcagatgatggcagaatcccgccatgtggtagatgaggcatatgccggagatattatcggtgtttttgacccgggtatcttttccatcggagatacaatctgtgcacccggtaaaaagtttgcattcgaaggtattcctacatttgcaccggaacattttgcgagagtccgtcagattgatactatgaagagaaaacagtttgttaaaggtatcaatcagatcgcgcaggaaggtgctattcagatttttcaggagtttaataccggtatggaagaaattattgtaggtgttgtaggtgtcctgcagtttgatgttctgaaatatcgtctggaaaatgaatataatgtagatatccgtctggaaacacttccatatgaacatattcgctggattgcaaataaagaagaagtaaaagtggataagatcattggaacctctgatatgaaaaaagttactgatcttaagggaaatccgctgctcctctttgtaaattcctggagtgtgggtatgacagaggacagaaatcctggcttaatattaacggaattcagtaaataacccttttcatttatctgtcgatttggtataatgaacaaagattaaagaatccctcaggaggttttcagatggcagagaaaagaataacatataaaatacaggatttaggaggcattggtgaggtccagatcgcagatgaagtggtcgctatcattgccggacttgctgctacggaagtaaacggagttgcttccatggcaggcaatatcacaaacgaactggtaagcaaacttggaatgaagaatctttccagaggtgttaaggttactgtactcgaaggagttgtaacagtagacctgaacctgaatatcgaatatggtaagaacattcttgagacaagtaagaaagttcaggagaaagtaaaatcatccatagagaatatgacaggtcttgaggttgcagatgttaatattcatattgccagtgtagatatggagaacgaaaaaggaaagtaaccctttccttttttgtgtacttaagagatatttagaaaggaaagctgtttatacagcaaaaattatgcgaagaagagagcagagagaacatatttttaaattactgttcatgacagaatttaattcagaggaagagatgagtgagcagctttcactttattttgatactctggaggaactttcagagaaagatcaggagtatatgagccggaaataccgccatgtacttgaaaaattagacgagatcgatgcactgttaaatgagacaagcaatggctggaagacaaagagaatgagccgcgttgacctgactgccctgcgtctggcagtgtatgaactgaaatatgacaaagatgtacctacaggtgtagctatcaatgaggcggtagagcttgccaaacgttttggcggtgagacttccggttcctttgtaaacggtatccttggcaagattgccaacagtgaaagcgaagaaaaatcagaatgaaaaacacatattctgtaggtcaggtaaaccgttatatcaaaaatatgtttacccaggattatttactgcagaagatttatgtaaaaggcgaggtgtccaattgtaaatatcatacaagcggacacatctatttttccctgaaagatgagacaggaacattgaattgtgtgatgtttgccggacacagacggggacttgcatttgccatgaaaaatggcgataaggtgatcgttggcgggagtgtggatgtatatgaacgcgacggccgctatcagatgtatgcaaaggagattaccctggaaggtgcaggaactctgtatgagagatatcttgcattgaagcaggaactggaagatatgggaatgtttgcacaggagtacaaacagcccattccgagatttatcagacgtctgggtgtggtaactgcaccgacaggtgcggctgttcaggatatccgcaatatttcctatcgaagaaatccctatttacagattattttatatccggctcttgtacagggggcgggtgcggcagaaagtattgtaaaaggaatacagatgcttgataagacagatgtggatgtgatcattgtgggaagaggaggcggctctattgaagatctctgggcgtttaatgaagaaatcgtggccagagctatttttgagtgcagtacacccattatttccgcagtaggtcatgaaacggattttacgattgctgatttcgttgctgatctgcgagctcctactccttctgccgcggcagagcttgcggtggatgattacagaagtgtgattgaagcagtaagtatttacaggcagcggttatatcgtgcaatgagtggtaaaatggatctgtaccgcagcagactggagcattttcagacaaaatttgcttatctgagtccggagaacaggctgcgggagcagagacagcgtctggcagatctggagaatactgtacaaaatggaatgaacaggaaacttcaggatgagagacacagattgtctgtttatctggaacgttttgcaggactttcccctttaaagaaactgaatcagggatattcttatgtggcagataaatataaaaagacattgacaagtgtagaacaggtacaaaatggggataccatttatatatctgtgacagacggtacgatagaagcagatgttacaggtacggtgaaggaggagagaatctatggcgaagaaagaaaactgtgagcagttacaggaggagaaacctctggaagagatgtttgcagaactggatctgctggctgaaaaactggaaaacagagacacatcgctggaggactcttttatactgtacagacagggcatggaacttttgaaactttgcagcgggaagctggatacagtggagaagaaaatgctgcagcttaatgaggatggtacatttagtgaattttcaagatgaattagcaaagagaacggaagaaacagagaaagtgatcagaagctttctgcctgcagaggcgggattcgccggaacaatggctcaggctatgaattacagtatgctggcaggaggcaagcgccttcggccaatgttgatccgggagacatatcgcctgtttgatggtaaggaagaagttgtaaaaccgtttatggcaggaatggagatgatccatactcattccctgattcatgacgatcttcctgcacttgatgatgatgattacaggcgcggcagactgactacacataaggtatatggggaagccatgggggtgttaagcggtgttgcgctgcttaattacgcatacgaaaccatgtttcaggcatttgccctgacaaaagagcaggatcgggtaatccatgcgttgagagtggtctcacagaaaacaggcattcatggaatgcttggaggacaaagtgttgatgtggaaaatgacggaaagccccttgaaaaagagatgcttgactatatttacagaaataagacgtcagcattgatcgaagcctccatgatgacaggcgcaattcttgcaggagcaaatgagcaggaagtatctgcagtggagaaagctgccggaaatataggactggctttccagattcaggatgatattctggatgtgaccagcactgcagaagaactgggaaaacctgtacacagtgatgagaagaataataaagttacttatgtgactctttttggaacagagaaggctgctgaacaggtggaagaactctcagaaaaggcaatcgatctgctgaagagtctgaataaaaataacgagtttctgtatttgttaattgaaaaattaataaaccgcagaaaataaaggaaggatacaaatgattctggaaaagattaagaaacccaatgatatccataagataccattggaagatttcgagcctctggcagcggagatcagggactttttaatccggtcagtaagtcagacaggcggacatcttgcttcaaatctgggagtagtggaactgactctggctcttcataatgtgctggattttccggaagacaaactaatctgggatgtaggacatcaggcatatacacataagattcttaccggaagaaaagatgaatttaagaatctgcgacaggaaggtggattaagcggttttcctaagagaagtgagagcccctgtgatgcatatgatgcaggacacagttccaattcaatttcggcaggactgggatatgtgcatgccagagatattctgggacagaagcatcatgtggtttctgtgatcggagatggtgctctcaccggaggaatggcgtatgaggcattaaataatgctgcagagttaaagacaaattttattattatcataaatgacaataatatgtccatttccagaaatgtaggaggcatgtccacttatctgagtgcactgagaactgcagaagcttatacaggaatgaagatgggtgtgacaaaggcactgaagaaggttccgaaggtagggactgctctggtagatactatgagaaaaaccaaaagcagtgtcaagcagctttttattccgggaatgctgtttgaaaatatggggctgacatatctgggacctgttgacggtcataatatgcgtcagatgatgaagctctttaatgaagcaaaacgggtagagggaccggtagttgttcatgtcctgacaaagaaaggcagaggatacgaacctgcaagtgcccatccggacaggtttcatggaacaggtccttttgatattaaaacaggccgggtacttcagaagaaaacagtgccgggttatacagatgttttttccaaagcactggtctctcttggtgagaaaaataaaaaactgacagctattaccgcagccatgccggatggaaccggacttgtggaattctccaggagatttccagacagattttttgatgtgggaatcgcagaggaacatgcggtgagttttgcggcgggtctggctcttggcggcctggttcctgttgttgccatctattcatcttttctgcagcgtgctgtagatcagatcctgcatgatgtatgtatgcagaagcttcatgtgatttttgctgttgacagggcagggcttgtaggcgcagacggggagacgcatcagggctgctttgatctgtcttatttgtccatgatgccgaatatgactgttctggcaccgaagaatgacagagaactggaagagatgcttgtatttgcggtaagctttgacggaccgattgcaatccgctatccgagaggcagtgcgcatcaggggcttcgggaatatcaggcacctgtggaatatggcagaagtgagattatccgcaaaggaaaaaaaatcgctgtgctgggagtgggaagtatgatcccgtcctgcatggaaatctgtaaaggactgaaagatgacggctatgatcctacttttgtaaatgccagatttgtgaaaccactggatgtggatcttcttgatgaactggcaaaggatcacagtctgtttgtgacagtagaagagaatgtgaaaagcggcggatacggagagcatgtgtctgcttatatggaagcctgtcatccggaaataagagtgttgtcggcagctgtttgggatcgtttcgtaccccagggaaatgtagaaagcctgcgcagccggattggacttggagtggaagacatcagacaggcaatagaagatagtgaggaattaagagagcaatgaagaaacgtttggatatgcttatgatggaacgtgcccttgcaccatcccgcgagaaagcaaaggcattcatcatggcaggcgatgtatatgttgatggtcagaaagaagataaggcgggaaccatgttcccggagactgtaaagattgaggtcagaggaaacactcttccgtatgtaagccgcggtgggctgaaacttgaaaaagctatgaaaaactttgatgtcacattggatagtaaggtctgtatggatgtaggtgcgtccaccggagggtttacagattgtatgttacagaacggggcagtaaaagtttattccattgatgtaggatatggacagcttgactggaagcttcgtaacgatccgcgtgtagtctgtatggagaaaaccaatatccgctatgtggtaccggaggatttgggagaaccggcagatttttcatcaattgatgtgtcctttatttctcttacaaaagtactgcttcctgtaagaaatctccttacagatgagggtgagatcgtatgtctgatcaagccgcagtttgaggcggggagagagaaagtcggaaagaagggggttgtaagagatcctgctgttcatcaggaagtgatcgaaaaagtgcgcgattatgccatgagtatttttatggagccatgtcatctttctttttcgccaattaaaggaccggaaggaaatatcgaatatcttcttcatctgaaaaaacatccggaaggtaccggggttaccgacagcctgaaggtatctgtagaagctgttgtggcagaggctcatggacagttggattaaaaaggctgagtcaggaagaaactatggacaggttttatattattacaaacagtgacaaggataaaaaacttgaaatcacagaaaaaatcgcagattatctgaaaacacatcacaaaaactgtgaagtacagcaggcagaaaggaaacatgagggttcctttcattatacagatcctgataaggttccggacgatacacagtgtattattgttctgggaggagatggcacacttcttcaggcagcaagggatgtggtgcataaggaaattcctcttcttggaatcaatctgggaaatctgggttttcttgcagaagtgaatcagacctctctgtacagtgctctggatcagctgatggcggatgattacgaggtagaagaacgcatgatgctggaaggaagggtgtaccgcggcagaaaactgatcggacaggatattgcattgaatgacattgtgatcggcagagacggtcatctccgcgtggtccggtttaagaattatgtaaatgatgtttatcttaactcttataatgctgatggaattattatttcaacacctaccggatctaccggatacagtctgtcagcgggaggacctattgtatcgcccaatgccgccatgacgatcatgactcccatagcaccacacacgctgaatacaagaagcattatttttcctgcgcaggatgtgatcactgtagagataggaaaaggaagacactgtgactgtgaaaagggaatcgcatcttttgacggagatacatttatccccatggtcaccggtgactgcattcagatccggcgggcagatgtaaagacaaagattctgaagctgaaccatttaagttttgttgaggtattgcgccggaagatgagagacagctgatcagcaggaggaaataaggtgaaagttgcgagacatgagaaaattattgaactgattcatcagtatgatattgatacacaggaagagctggcctccagacttaatgaggcaggatttaaagtgacacaggcgactgtatccagagatattcgtgctctcaagctgacaaaagtggcaggaaaggacggaaagtcccgttatgcaattattaataatgaatcaggaagtcttggagaaaaatatacaagagtactggaagataccctgctttctattgatgtgggacagaatatcattgtgatcaaaaccgtttccggaatggccatgggcgtggcagcagccctggatgcgttgaaatggccggaaatactgggatgtattgcaggtgatgacactattatgtgtgctgcaaagactgcagacatggcactgggagcagcagagaaactgagaagttttgtcagattgaataagtgatctcacgagtaactgctcaatacctttgcagttacgatcctgaacttttaacattacaaatgacttgattatggaggcaataaatgttagctcatctgcatgtgaaaaatcttgcactgatagaagaaatagaagtggaatttggtcccggactgaatatcctgaccggtgagaccggagcaggtaaatctatccttctggggtctatgcagctgatcctgggtgcaaaaacttctaaaaatatgataagggaaaatgcatcctatgcacttgtggagctgctttttcaggtagaaaacgagaaagcgctggagacactgaaagcactggatatctgtccggaagatggacaggtacttctgtccagaaaaattatggatggaagaagcatcaacaagattaatggagagacaagtactgtaggtcagatgaaggccgctgctgcatgccttttggatatccatggacagcacgagcatcagtcacttctgtatcaggataagcagcttgcaatcctggatgcatatggaaaagaaaaaatccttcctgcaaaggagaaagtatctctggcatataaagaatacagcaaatgcaaaacagaacttggttccatgaatatgaatgaggagcagagaaatcgtgagctggcttttctggagtttgagatcaaagaaatcgagaaagcaaatctgcagccgggagaggatgaggaactggaagcccggtacagaaaaatgagcaatgcaaaactcatcgttgactccttgcagcttgtacataatctcacaggctatgaaagcaaggaaggcgccggagagactgtcggagaggcattaaaggaattctctcatgtaacacagtatgatccggagcttacacctcttgcagagacacttacttctgtagacggtcttctgaatgattttaacagagaattatccacttatctggacgagctgacctttgatgaaggagagttttatgagacagagagaagactggatctgatcaatggactgaaggcaaaatatggacgtaccattgaggaaattttcacatatcgcaaacttcaggaagaaaaactggaaaaattacataaatatgaagaaaatttacaggaattaaaggagcgtctcagagaactggaaaatattcttgagaaaaagtcggatgaattagcagaaatccgtaaagaatacagtaaacagcttgagcagaagattattcagggattgaaggatttaaatttcctggatgtgaattttgccattgatttccggaaaaagaaaaactacacagataatggaaccgatgatatccagtatctcatttctacaaatcccggagaaactctgaagccactgggacagatcgtatccggcggtgagttgtctcgaatcatgcttgcattaaaggcaatccttgcagacagagatgagattgagacattgatcttcgatgagatcgatactggtatcagtggaagaactgcacagaaagtctctgaaaagatggcagtgatcggacagcatcatcaggtactctgcatcacgcatctgccgcagattgcagctatggcagacagtcattttgaaattgaaaaacatctgcagggaactgagactattacccagatccatgtgcttaaagaacatgattccatccgcgaactggcaagactgttaggtggtgcagaaattacacctgcagttcttgagaatgcgaaagagatgaaagaattggcacagaaacaaaaaaatacaagatttaaataaaataattgaccacatactaagagaggataatctttgtgacggattgttctctcttatttttgtacctttcggatttgctgtgatgggaagtgttttatggcaatttcacagttacagaatttcataaatacagaatgaaaggatgtgcataacaatgaacaaaagaaaatacagactttttgtcatctgttgtcttgtgctggatctgttggtgatgctgatatcaggttacagatatctggacagaaagatacctgacgaaattcagatttccagaggcaaaaaaacagaagatgtcacagaagttttgtcaacaccatttgttacatttgaagaagcagttactgtttcgcaggatggaggctatattctgccatgtaaacttttgggttatattccatttaaagaaataaaagtgacacctgcagatgatcaggaaatttatgtcagcggaagcaccataggaatttatatgcaaacagaaggtgttctggtgattgacaccggtgaaattcagaatcggaatggtgagacagaggagcctgcgagaaatattatcagacagggagattacattatctcatttaacggagaaaaaatctctacaaaaagagaactgatagatgacatctcagaacttgatggcagcgaagttacactggggataagccgcaaaggagagagtattcctgtatctgtaactcctgtaaaagacaaaaaaggagactataaacttggaatctgggtaagagatgacacgcaggggataggaacgcttacctacgtagatcagaatggtaattatggtgcccttggccatggaatcagtgatatagacactgcccagcttctgaatatccgaaacggagctttgtataaagcccggattcttgcgattaacaaaggaagtaaaggcaatcccggcgaacttgcaggatacatctgctatgatgacagaaatattcttggaactatcgaagcaaacagcagaaacggaatttatggtcagttcacagggattgcagatgatgcgatcactttaaagaaaatgccggctgcgtataagcaggaagtgaagattggaacagccacaattctctgcagtacagatggcgaggtaaaagaatatgatgcagagatcagaaaaatagatttgaatcatgaagataccaacaaaagttttgtgataaaggtgacagataaagaacttctggaagctacaggagggattgtacaggggctcagcggaagcccggttatccagaatggaaaaatcattggtgcggtaactcatgtatttgttcaggatgcttccagcggatatggaatctttattgaaaatatgctgaaaaatacagaaagactcttttaatggatgatcaggattatgaaacaaaaatctgattattgtcgaaatatatcagatgcctgtgaaaaatgaaaataaagaaaaaagaatcaccaaagctgtcgacataaaataggacaaatttccctctgtgtcttgatttttccgtaagcattcctctataatatgtgatgaaccgaaaaagaaaagagatttattgaaaaatgggggaggagtgaaatttatggaaaaattaaatgtggcaattgcagatgataatgagaaaatggtggaagtacttggtcagataatagaagaagacaaagatctggaacttgtgggaaaagcgcataacggagaagaaatctgtaatattatacgtgaaaaggaaccggacgttgtggttctggatattattatgccgaaaatggacggactggcagtaatggagaaatttgccaatgacaaaagtctcaaaaagatcccatcatttatcgtagtttcggcagtcggtcaggaacgtattacagaaaatgcatttaacttaggggcagattattatatcctgaagcctttcgataatcagatgctgcttaatcgtatcaaacatgtgcgcagagccagcgagagaagaatacgtcagatcgggcggcagcctgaaaggacagaagacaatccggtacctgtgagaaatctggaaacagacgtgacaaatatcattcatgagattggagtgcctgcacatattaaaggatatcagtatctgcgtgacgccatcatcctgtcagttaatgacatggagatgctcaattccattaccaagatactgtatcctacgattgcaaagaaacatcagacaacagccagcagagtggaacgggctatcagacacgccattgaagttgcctggagcagaggaaaaatggacacaatagatgaattattcggttacacagtcagtacaggaaaagggaaacccacaaattcagaatttattgctctgattgcagataaaatcagactggaatataaaaatcgctctttccaatagtcatagtttggagtataattattcaataaaggctaccaaggagggtttttcgcatgaaaaatattttatttgcaacatctgaagctgtaccatttatcaaaacaggaggtctggcagatgtagctggctcattgccgaaatattttgataaacgatattttgatattcgtgtgatcttaccgaaatatgcctgtatgaaacaggaatggaaagataaaatgaactatatcacacatttctatatggatcttggatataagaactgctatgtaggaatcatgcacatggagtacgaaggaattcagttttattttattgacaatgaatactatttcagcggacccaaaccgtatgatggaggaacatgggatctggagaaatttgcattcttctccaaagctgtactgtcagttcttccggttatcggattcagaccggatattatacactgtcatgactggcagaccggacttgttcccgtatatctgcacgacagcttccagcagaatgaatttttctggaatatcaagacgatcatgacaatacataaccttaaattccagggtgtatgggatgtacagacaatcaagaatatcacaggactgtccgattattattttacagcagacaaactggaagcatataaagatgccaactatctgaagggcggtattgtgtttgcagatgcagtcactactgtaagcaatacttatgcagaggaaatcaagacaccgttctatggagaaaaactggacggcctgatgtgtgcgcgtgcaaacagcctgcgtggaattgtaaatggtattgattacaatgaattcaatcctgaaacagatccatatatcacaaagacttataatgcaacaactttcagaaaagagaaagttaagaacaaacttcagctgcagagagatcttggattgcaggaagatccgaagacgatgatgataggtattgtatcacgactgacagatcagaaagggtttgatctgatcgcatatgtgatggatgagctttgccaggatgctatccagcttgtaattcttggaaccggtgatgaacgttatgagaatatgttccgtcactttgactggaaatatcatggaaaggtatctgctcagatctattatgatgagaaaatgtctcaccgtatctatgcatcagcagatgcgttcctgatgccgtccttatttgagccatgtggtttgagccagctgatgagtctccgttacggaacacttccgatcgtcagagaaacaggtggactgaaagatacggtcgtaccttataatgaatatgagggaactggaaacggattttctttcagaaactacaatgcgcatgagatgcttgcaacagtgcgcaatgcggaaagaatctattatgataagaaacgtgaatggaataaaatggttgatcgtgctatggcagctgatttctcatggggtaattccgcacgtcagtatgaagaaatgtacaactggctgattggtgataaatagaaacagagagaaatattaaaaactacgaaagagcagggaatgtaaaaaaagcacattccctgcttttactgttatgttgttactgtttacacaccattatcccgcgaggtgttttggcatgaatatgccaaaatcccgagacatacaagccaaaattctattgccgcaggcaatctggtatgaattttggctacgttactgtgaacggagtgaacagtaaccagtaacatgaaaaggttattcaggcagaataaaaagcttgacatttgacaggaagtataatactataataaatagaaaacgaacataagttcttaaagggctgaaggagattaaaataaatgataaatgaagaaaagcagaaagcactggaagcagcgcttggacagattgagaaacattacgggaaaggatcagtcatgaaactcggggaatccggagcaaatatgcaggtggagacagtccctaccggatctttaagtcttgatattgcacttggagtaggcggtgttcccaagggacgtatcatcgagatttacggaccggaatccagcggtaagacaaccgttgcacttcacatggttgcggaagtgcagaaacgaggcgggattgccggatttattgatgcagaacatgctctggatcctgtctatgcaaagaatatcggtgtagatatcgataacctgtacatatcacaaccggacaatggagaacaggcacttgagatcacagagacgatggtgcgttccggagctgtggatattgtgatcgttgactcggttgccgcacttgtaccgaaggcggagattgatggagatatgggtgacagccatgtaggtcttcaggccagattgatgtcacaggctctccgtaaacttacagcagtgatcagtaaatctaattgtgtagttatctttatcaatcagctgcgtgagaaggttggagttatgtttggaaaccctgagacaacgacaggtgggcgtgctctgaaattttattcatctatccgcatggatgtccgcagagtagagacattgaaacagggcggtgagatggtgggaaaccacaccagaatcaaagttgtgaagaataaagtggctccgccgtttaaacaggcagaatttgatattatgttcggaaccggcatttccaaagagggagatattcttgatctggcagcggaatgcggaattgtaaataagagcggtgcatggtacgcatataacggagataagatcggacagggacgtgaaaatgcgaagattttcctgaaagagcatacagatatctgtgatgagattgagaagcaagtcagaatccattatcatcttcttccggatgaagaaggacaggccaaagagccggtgccggcaacaggtgatgcaccggatgcttctgaggagtgatcatggggaattcatccggagatctgagagaatttctcaggaatgcagaggctttaaagagacagactgtacagaaacaacagaaaaatttaacggaagaacctgaagaatacagagacgcaaggcgtaaagccatgcgtctcttagaacatatggatcggacggagaagggattgagagagaaattgcgccaggcgggatttaccagtcaggcggttgatcatgctctgacatatgttgaagcctatggatatatagatgatgaacgatatgccagaacttatattgcatacagaatggatacaaagagccggcagaagatcatccgggaacttatgggaaagggaatagacaggaaaacagcgataaatgcatgggaggaagaggctgccttaaatatgcctgatgaaaaagaaatcctctatcgaaccatagaaaagaaatatccgccgaatactgagctggatgagaaaaaaatgcgtcggctctatggttatcttgtgagaagaggatttggatattcagacattgcagatactcttgagaatatgaatatcagacttgtacatacatattcggatgaatcatagtatactccattgtatgtatattgcaaaatatattactgagaacagaacgaacagtaattaaatataggaaaaatattcaaacaattatcctgaaaaacttgacataagtatgaaaaaaagataaacttgtattgttgtatttgtacaatgaaaactaaataaggaggtgctcctgtgacaacaacaattattgttgcaattgtcgctgtggtagtcgcgctacttattgcagttcctgttacttgcaaagtcgctgtgaacaataaaatccagaaggatgccgagattgttgggacagcagaagacaaagcaagaagcatcatagatgaagctctgaaaacagctgagactaaaaaaagagaagctttattggaagtgaaggaagaatctctccgtacaaaaaatgaactggagaaagaaaccaaggaacgaagaaacgaactgcagaaatatgaaaatcgtgtattagcaaaagaatccgcggttgacaagaaagcagatgcagttgagaagcgtgaagcggaatgcacagcgagagcagctgaggtgcagaagaaagaaaaacgggtagaagaacttgagcaaaaaggagtacaggaactggaacgagtttcaggtctgacctccgaacaggcaaaagaagaattactcagatccgttgaagatgatgtaaaagtggatgtagccagactttacagggaattggaaagcagggcaaaggaagaagctggtaagaaggctaaggaatatgttgtcaatgccatccagaaatgtgcagttgaccatgtagctgaaactaccatttcggttgttcagcttccgagcgatgagatgaagggaaggattattggtcgtgaaggccgtaatatccgtactcttgagacacttacaggtgtggatcttattattgatgatacaccggaagcagttgtgttatctgcttttgatccgatccgtcgtgaagttgcacgtgtagctcttgagaaactgatcgtagatggacgtatccatccggccagaatcgaagagatggttgagaaagcccagagagaagtagaagcgcagattcgcgaagatggtgagaatgcagctatggacgttggagttcatggtattcatcctgaattactgaaacttcttggacgtatgaagttccgttcaagttatggacagaatgctttaagacattctattgaggtagctcagttatccggaatgctggccggtgaggttggcgtagatgtccgtatggctaagagagcaggtcttcttcatgatattggtaaatcaattgaccatgaagtagaaggatctcatattcagattggtgtggatctctgtaagaagtataaggaatcccagattgttatcaatacggtcgcatctcatcatggtgactgtgagccggaatctctgattgcatgtattgtacaggctgcagatgctatttcagcggcgagacctggtgcaagaagagaaacgctggaaacttataccaatcgtctgaaacaactggaggatattacgaaccagtttaaaggtgttgataaatcttttgccattcaggcgggaagagaaatacgtgtaatggtagtgccggagcatgttaatgatgcagatatggttctccttgcgcgcgatattgcgaaacagattgaagcagaacttgaatatcccggtcagattaaagtcaacgtgatacgtgaaagcagagcgattgactatgcgaaataatatgattgttcattttatggactatcgtggacagttttttgcagatataaactgtgcagattgtatttatacagtctgtgcagtttttttatgttatgttataggaaattactccgtaatgttcctataacataaaaaagccctccggacacgattctttcttgtaaagacaggaatacttcctggaatttctcagtaaactggtacagggtgatagaatgaagaaaaacagaacgggaaccaaaaaatttcctgcgcttattttatttcttcttggatttctggccggaaatctgataccgaatataatctggaaggcaaaatggcagcagaaaacatgggcatcggtatattttctgagtacatttgcaggaaaaaatacaggcaatattgaatatctgaaagaaatattaaaatacagaggtgctttttatctgttgaatataatctgtggattttcggtttttggtgcgccgcttgctgttataacgcttctgggatcaggattgtatgcaggtatgataatgactgtttctatactggaatttggatttgcaggcggggtgatcggaatgggacttttgctgccacaatatttattttacattccggtctggctttattctatggaacaggaatggaagatatcatcagaaatatggagaaacagaggtctgatttccggagaagtcagtatttatcttaaaaaaatgtgcattgcagcagtaggatattttctgggaatacttatcgaatgctatgtgaaccctctgatcattgatattattctgaaatacataaaaattttttaatgacatatctactatatttagtattggttgtcataaaatctccgacatatggtatttgatgctgaaaaagcttgaaatacaaggatttttctcgaaaaaaaggtttgattttatgtaaaataaacagtataatacatatacattttatcggagagagtacgattttctgctgataaactgcgaagaggattaattttcgtctgatcgcaggagctacaggcagcggatattttgattaaaaggaaacgggaatatggacatagaaataagggaatttattacatatctgcataatacaaaaaaaacatcggcaaatacagagatctcataccagagagatctgaaaaaaatggcggaatttctgaaggaacggggaatcagaaattataaagatgtaaaagaacttgagcttgaagggtatatcagttacatggaacgtgagaagtttgcgtcatcttccatttccagaagcgttgcttctatgagagcattttttcagtatctgtggaaggaaggcgtgatcgcagaagatccggcagataacctgaaacctccgaaggttgagaaaagggcacctgagatacttaccatagaagaagtggataaattacttcagcagccgaaattggatacccctaaagggataagagattcagcaatgctggaattgctgtatgcaacaggtatgagagtcagtgagatgcttcatcttcagatttttgatgtcaatctccagtttggatatgtggtttgtaatgagaatggaaaagagaggattatccctattggtattccatgcaagaaggcaatggaacggtatctgcaaacagccagaactgtttttgtgaaagatgagaaagaaacagcattatttacaaattgttcagggaaagcgatgagccgtcagggattctggaaagtattaaagggatatgcggatgatgccggtatcaaaagggatattgccccgcatacattgaggcattcttttgctgtgcatatgctgcagaatggtgcggatatacgaagcgttcaggaaatgctgggacattccgatatttccactacgcaggtttatctgggcatgaatatgaataaaatgcgtgatgtgtatatgaaaacacatccacgtcattaaaaacttattatttatgaggattgctataatgttaaatgaaaaagcttctatagtctgttttgaacagtttatagaagcttttttaactgaatcaagtaagtcccctgctttaattgcgaagagcaataagcagtgggtggctgaatagtttttttctgtaatgtcataacatgcgctatttacagataatgtaattacagcgatccatctgatcagagagtatggaatgttgtttataaacaataacggatcaacacatctcagcaattgtatacagaagacgttcggattcttcccatccaagacatggatcggtaatagattttccgtaaatatgatcacatccgatcttctgatttcccggttcaatataactctcgatcataagtccttttaccagagtatgaagttccgggtctacctggcggctgtggagaacctcttttgcaatacgaacctgctggtcatattgtttattagaattagagtggttggtatcaacgataacagccggatttttaaggtttttctcctgatatttctcccagagaagacgaagatcctcgtaatgatagttcgggattgcctccccatgtttatttacggcaccgcggagaattgtatgagccagttcattacctgttgtttctacttcccagcttctgtagataaaacgatgtccgccctgagctgctacaacggaattgagcatgactgcaagatcgccgctggttggatttttcatacctgcaggaacttccatgccgctgacggtaagacgatgctgctggtcttccacagaacgtgcacctactgccacataagaaagcaggtcagaaaggtaacggtaattttccggataaagcatctcatctgcacaggtcataccactggtccggattgcatggatatgcattttacggattgctacaagccctgcaagaagatttggctgtttctcgggatccggctggtgaaccatacctttatagccttctcctgttgttcttggtttgtttgtataaacacgtggaacaatcagaaccttgtcagctattttctcctgaacattgcgtaatctggtaagatagtccagaacagcatcttcattatctgctgaacaaggaccgatgattgcaaggaatttatcggactttccggtaaaaacatcacgcagttctttatctcttgcatctttaacagcctgaatttcagcatcaatgggatactgattacggatttcttcaggggttggtaattttttgataaaatcgaatcccatagtaatatctcctttgtgtctatttgtcttgcttttttcggaatttattataaaccattcctatctgaatgtcgatagccaaaatattttcggatgactttctgcgatcatatcaagcgttactgttcacttcgttctcagtaacgtagccaaaattcattccagattacctgcggcaatggaattttggcatatccatgccaaaacacctcgcgggatagtggagtgtgaatagtaactatcaagtctcttaatcaagatgcattatttacggggattgctatagttgttttgcagtatttgtaaactgtgcaggatgctgagcgccagttcgctgcagagaatcccgtacagatatccccggattcccagaacagggattgcaaacagcacgaaactgatccggatgcagacgctgatcacactgtgcagcaggcagatgccggattttccaaggccgttgagtacgctggtgagagtggtgttcaggtacagaaaaggacagatataggacatggtatggatatagattccggctgtctgactgtgaaacagaaaatttccaagaaattctccaagaaacagaaaaaaaaccaagcaggatccgcctagcagcagacagtatcggaaaatcctgccgatcacatattggattcgcttttgataccccagagtctgcagctgggtaatggagggaatcagcatggccgcagccgagtttgtaagcgtagcggggaaaagaataagcggaagtgccatccctgtaaagattccgtaaacactcagggaatctttgggagtaagtcctgacatttgcagccttgcaggtataagaatcacttcaatacttcccagaagggtgagcagtattttattcatggtaagaggaacggaaatatggagcaattttctgagaacagaaagcggtcttctgatattccggatattataatgtgttaccttaaaatgcatactgactgcgaaaagagaaataaaagatgaggctatttccccgataagatttccgccgactgcaattgccggagtgatgtttcgcccttgcgatgcacagatcagataaagaatatagcatccgcctgtgcggaaaagctgttccagaagctggactcctgcgggaaatccggcctgttttcttcccaaataatagctgctgatacaggtatgaagtgtactcaacggaatactcagagaaagaatccgtatcagaccggaggtctgtgactctttcaaaatctgtactgcccagaaatccgcatagctgtaaagaaaccaggagaataccagggagaaaacaacagaaaatacagttcccacgacaaaataatctgagatatgacgactgggatttttggaaactttttctgcggcagtgaggcgggagattgcagtctggataccggaagcgcagatggacatgatcagaatctgcagtggaagtataagctgaaagataccaagcccatgtgcaccaatagtgtgtgacaggaatattctgtaaaagaaccccataagtctgcttaataaaccggcaaatgtaagaagtaaagttcctttgataaaaagtttttttgacataatgaaaaatccagaccttttcatgcgcagcaggtgcgaatatccgcttgactaaaaaacagtaacctgccgaaacgcctttacagcaatatatgaacaaaacagccttgacagaacggtttgtttctggtaaagtaatcatgaaatccgagggaaacactgggaattaaaaaacgaggtgagaaaatgaaactctcaacaagagcccgttatggcttgaaagcactgatagatcttggcttgcacagtgcgaatgaagcgatatctttacagagtattgcggagagacaggatatttccacaagctacctcgaacagcttatggccatgcttaagaaggccggtcttgtaaaaagcagcagaggggcttacggcggataccagcttggcaagccggcagatgagatctcggtcggtgaagtcctgcgtgtgctggaaggcagcctggaagcagcagcctgtcccgggattgagaatgacggaacctgccatggcagtgatgtatgtgtggcaaagctcgtctggaagagaatcaatgacagtattacaagcgctgtcgataccctgatgcttggtcagctgatcgaggaaagcagaagagtacatgaagaaaaaatggaaagtcagggcatggaagaaaatgtaccggacatacttaaataaaacaggaggacaagaaaatgggaaaaatgatttatctggacaatgcagcaacaactaaaacagcaccggaggttgtccaggcaatgctgccatatttttcagaatattatggcaacccgtccagtatttatgattttgcaggcaagagcaaagaggcgatcaccaaaggaagagagcagatcgcagaagttcttggagcaaagaaagaagaaatttatttcacagcaggtggttccgagtctgataactgggctctgaaggctacctttgaggcatataaagcaaaaggaaaccacatcatcacaacaaagatcgagcatcatgcaattctccatacctgtgaatatctggagaaacgcggcgcaaagatcacatatgtagatgtagacgagaacggtattgtaaaactggatgaacttgagaaagcaatcacaccggaaacaatcctgatttctgtaatgtttgcaaacaacgagattggttctatccagccgatcaaggaaatcggacgtatcgcaaaagagcatggagtgcttttccacacagatgctgttcaggcattctgtcaggttccgatcaatgtggatgaatgcaacattgatatgttaagctccagcggacataagatcaatggaccaaaaggaatcggtttcctctacattcgtaagggcgtaaaaatccgttcctttgtacatggtggtgcacaggaacgtaaacgtcgtgcaggtacagagaatgtgccgggaatcgttggatacggtgtagcagcagcacgtgcaaatgcatccatgaaagaacgtactgacaaagaaatcgctatcagagatcatctgatccacagaattgagacagagattccttatgtaaaagtaaacggtgaccgtataaaacgtcttccaaataacgtaaatgtcagcttccagtttgttgagggcgaatctctcctgctgatgctggataattatggaatctgtgcatccagcggatctgcctgtacatcaggttctcttgatccgtcccatgtacttcttgcaatcggacttccgcacgagattgcacatggttctctgcgtatgacactcagcgaagagacaacaatggaagatgtagatttcgtagtggacagattgaaagaaattgtagcgcacttaagaagcatgtctccattatatgaagatttcatgaaaaaacagaataaataacaaaacagaagataattgtttgtatttttgcagttacaacagaaataatattaaaagaaagtcaggataacaggaggaaacacaaatggcttacagtgaaaaagtaatggatcattttcagcatccgcgtaatgtaggagaaatagagaacgcaagtggcgtaggtacagtgggaaatgcaaaatgcggtgatatcatgaggatttttcttgatatcgatgatgaaacacatatcatcaaagactgcaaattcaaaacattcggatgtggtgcggcagttgcaaccagcagcatggcaacagagatggtaatgggaaaaaccatcgaagaagctatggaagttacaaataaggcagttatggaagccctggacggacttccgcctgtaaaagtacactgctccctgcttgcagaggaagcaatccatgcggctctgtgggattatgcacagaagcatcatattgagattaaaggtcttaagaaaccaaagtctgatattcacgaaggtgaagaagcagaggaagaagaatattgattatagcaaaaaatctgaatctgtttgtaatctgaaatcgttatttataaagaaggggcgggtgatactcatcatctgccctgtgctttatattatggcattatatgataccagggacaaaagatattttgtgaagcagttcccgcaatttttattatatgatgctgctataaatattttctgcaggaggtagaaatgacaggacttacaaatgaacaggtgcaggagaggattgcagaaggaaaagttaatgtcaacgagaacccgaataccagaacctacaagcagatcattttggaaaacacgctcacattttttaactttttaaatattgcattgcttgttctggtgctttttgtgagatcttataagaactccatgtttatgggaatcattctgatcaatacagtgataggtattattcaggaaatcagagcaaagaagacgattgacaaacttgcaatccttacagagagtaaaacagtagttttgcgtgaggggaagaaatggagtatttccacagagaaacttgttctggatgatctgatctttctgaaaacaggagatcaggttccggctgacgtaaaggtactggagggaactgtagaagtaaacgagtctctactcaccggtgagtcggacaatctgtccaaaagccagggagacgaacttttttcaggaagctttgtgacatcaggggaagcttgctgtcaggtaatccatgttggaaaagataattatgcatcgcagatcacaagtgaagcaaaggaatttaaacgtcataattcggaacttcgcaattctctgaatgcgattctgaaggtgatcagtatcattatcgtgcctcttggtgccatgttgttttacaagcaatatatgatcgtaggagatacactgaaggattctgtggtaaatatggttgccgcagtacttggaatgatcccggaaggcctggtacttctgacaagtgtggcactgacattgggttctatggttcttgctacaaagaagacacttgtgcaggagctttactgtattgaaacgctggcgagagttgacacgctctgtctggataagaccggtacgatcacagaaggtaccatgaaggttgaagatgtgcagttgtatgatacagcacagacaactgttgtacaacatacagcaaaatttgatccggaaacaggggagcctgttcagaatgtgtcagcattaaaaccggaggttacggtatcagcagagaaggaaaacggacagatacaggaaacagtaaatttagaaacggtatctcaggaagaaagacagaagcttcaggaaattgaccacattatgggaaatatgatgtcagttcttcatgatcagaatgcaacagcagatgcgctgagaaagcgctttccttcaagaaatgacctgaaactgatccatgccattcctttctcctcagacaggaaatacagtggtgctgtttttgaaggaagaggaacttatctgatgggagctgcacagttcctttttccggaaggaaatgaagaacttctggaacattgcagcagttacgcacaggagggataccgtatccttgttctggctcacagtgaacaggagacaaaaggaacggaacgcccgacaggacttgaaccgttgggactgtttctcatcactgacgtgatacgtgaggaagcaccggatactctggctttttttgacagtcagggagttgaccttaaagttatctcaggagatgatcctgtgactgtctctgcgattgcaaagaaagcaggactgaaaaatgccaatcattatatcgatgcaacaacaatcaaaactccggaagaaatgcagcgtgcagttgcagagtgcagtgtattcgggcgtgtaacaccacagcagaagaaacagatggtacaggctcttcagtcacagaagcatacagttgcgatgaccggtgatggtgtaaatgacgtacttgcactcaaggaagcagactgcagtattgccatggcagcaggaagcgatgcagctaaaaatattgcaaatgtcgttcttcttgattctaatttcggggcaatgcctcatattgtaaatcagggccgtcgtgttgtaaacaatatcagaagtgcggcatccatgtttttgatcaaaacaattttttctgttttactgtcattgatcacaattttctttggagatgcatatccctttgaaccaatccagatgtcactgatcagtgcctgcgcagtgggaattcctacatttcttctgacacaggaaaataattacaataagattgaccatacattcctgagacacgtatttatgaatgcatttcctgcggcagtaaccattacaggatgtgtatttacgatcatgctggtctgtcaggatgtataccattccaacgtcatgcttaatacagcctgtgttctggttacggggtggaactatatgtctgcactgcgtacagtttattcgccgctgaacacatacagaaaagtgatcatttatggaatgcagtttgcattttttataagtgcggttgtattgcaggatttgctgacactgggttctctggaatttggaatgatcattctggtatttgtactgatgacattctctccaatcctgatcgaaactattacagaatggatcaggaggatttatgagaagtcactggacagagaagatgaaaataaaggattttttgcaagatttttggaaagagtccagaagtaaaaaacgaggacaatctgtaaaatatgcagattgtcctcgtttgcattatgcggtctgcgttatgcagattaatggtttatttctttctgcacagccagaagcatccaaatgcagggatcataacacctttagcttccatctcatgtcctgagataagatcagtgtatatgccgtcatcttcgttgatccatgcaaccttatcctgatcgctgaagttatagattccgatgaatttctcctctgcattttcgcgtacgattgcaaggatagaagaatcccaggtatcgattgtacgaagatcagctgttgtatcaaaaacgctgtgtgaacttctgatatgttccagatgatccagtgcgtggaaaagttttccctgtactgtatctgcgatatttctgtttggagcaagtgaccagttgaattctcctctgtgaagatagcgggaatcaactgccttgtcaggatcatctttataagaatagtcatttacctgaccaatctcatctccgctgtagattacagggatacctgactgggaaagcataaatgcatgaagtgtgatgtcatagcgcacacttctgtcaacaccaactacatttccttcaaaaccatatttctcaatgccgcacagagatgcggtagtaccgcaaagtcttgcatcacccagacgcgggtcatcattgtaaagttcaccgcggccaaatgtatccggatatttgcctgtaaagaaatcattcaggaatttcttatgagaaacctcatcgattgagaaattcttcaggaaatcataatccagtccccagccaatatcatcgtggcaacgcagataattctggaagatgtattcttttggaagagatcccagaatatccagctgtctgcggagcagagatacatctttggttgcaactgtgtgccaggtgcttgccatagtagtaacgttatacaggatatggcattccggcttttcaagtgtaccgaaatatggaacaactttttcaggagccatgacaacctctccgagaagaaggactcccgggcacacgatctcgcagatcatacgcatcatacgtacgattgtgtgaacctgtggcaggttgcggcagtttgttccaagctgcttccagatataaggaactgcatcgagacgtacgatgtcaacaccctggtttgccagatataacatattgtagaccatttcgttaaacacaacaggatttctgtagtttaaatcccactggtatggatagaaagtagtcatgacatgcttgtgaaggtcatccagccatgtaaagttgcccggtgcggtagttgggaatacctgtggacaggtcttctcatagagagcaggaacatcgtaggtatcaaagaagaaataacggtcctggtattctttttcacctgcgcgagcccgttttgcccactcatgctcttcggaagtatggttcataacgaaatcaaggcagatgttgatgccgcgttcatggcatttggaggtaagctctgaaaagtcctccatagtaccaagctcaggctgcactgtgcggaagtcagctactgcgtaaccaccgtcactttttcctttcggagatgcgagcagaggcatcagatgaagataattgacattacattcttccacataatccagatgttcctccagaccttttaaagtatgtgcaaaattgtttacatacatcatcatgcctacaaggtcattgcgtttataccagtccggatcagcctcacgctttttatcagatgcctttaatgctgaatttctgctgttatagaaagcttccatattagaagtaagatcatgcagatatgtcatgacatcatcacgatcctgatataattcgcaatataaccatttcagctcatcataatgtttctgaaaacgttcattatataaagtaagatcaacaggaacgtccagtttaacaggttccactttggaagtctcgaccttaacaggttctactttagaagtctcgaccttaacaggttctactttggaagtctcgaccttaacaggttctactttggaagtctcgaccttaacaggttctactttggaagtctcgaccttaacaggttccactttggaagtctcgaccttaacaggttccactttggaagtctcgaccttaacaggttctactttagaagtttcaactctgacaggctcagttttggaagtagtcacttgtaaaatttctgattcctgctttctgattgttgatgaagaacgtttcttctggagtctttttttagccataatattcctccctggtttatgaaaaatacagtaaccgggcagtgtcgggacatataaaacataaatatggagacaccggacagttacgaatatatacagaaagctgcaatttccatatctgctgtcagttttttatcatgatcagctatgatgcagatcagagaaacagtatttggagcagtttggaaattgggcttctgaaatcatatgtaatattatattataggaactgccatataggcaagtactgacacgttttacagagaaataaattccggtttacggtctttgaagattgtatagtaacgaaaaccacaggcttccagtacactggcagctttatcaaatgcacaggcgattttatccggagtatgcgcatctgctccgatggtgatgatctctccgccaagttctctatagcgccttattacggcagtacatggattgggttctccaagaccataatgatatccgccggtattaagttcgatgccttttcccatggaaatcagtttcttcagaatctcatccagaatatctttataccgtccgtaagaatattcccggttcctgttaggaccataacggacaacataatcaatatgtccgtaaacgtcaaatccgtcatatgcggaaatgttttcaagaatggattcaaagtattccatataacataaaaattccttacgtccttcaaaaaattccgggtaataaggatcatacccatggacaagatgggatgaaccgataacgaaatcaaaaggtgtctgagagagaagtgagtcaaaatattctcccagatgcatctgcagtcctagttcaattccgaaacgtacctgaattttatccttatatatatctgaaagttcagccagcttttctttgtaagccggaatatccagagaaaaatccagattgtccggagtaacagggtaatccggatccagatgttccgtaaaagtaattccctgtagtcccgtttcaacagcgctatggatcataacttccataggcgtatccgagtcagcagaaaaagaagagtgcatatgacaatcccacaatatttgtctgtccataatttcagtcctttcttctgtaaaaaacagtactgttatatttgcgtgtgatatattacaaatgaatacggtgtcctcttaaatggatatatctgcacctgaaatatcacaattacaggcccggatcagtgtattcataaagcactgtatacacagtataacatataatttacattttttacttaatttttatctgttttttggaaaatggtcttgaatttttgtttagaattatgtacaatacattacaggttgatgattctttaacaaacaaaggattaccataattaaccacttaattcataggaggaattttatcatggcagtaaaagttgcaattaatggttttggacgtattggacgtcttgcattccgtcagatgtttggagcagaaggatttgaaatcgtagcaatcaacgatttaacatctcctaaaatgcttgctcacttattaaaatatgattcaacacagggaaaatatgctcttgcagatacagtaacagcaggagaagattccatcacagttgacggaaaagaaatcaaaatttacgcaaaagctaacgctgctgaacttccatggggagaaatcggtgtagacgtagttcttgagtgtacaggattctatacatccaaagacaaagctcaggctcatatcgatgcaggtgctaaacacgttatcatttccgctccggctggaaacgatcttaagacaatcgtttacaatgtaaaccatgaaactcttacaaaagaagatcacatcatctccgcagcttcctgtacaacaaactgcttagctccaatggctaaagcattaaatgatcttgctgcaatcaaatccggtatcatgtgcacaatccacgcttacacaggcgatcagatgacacttgacggaccacagagaaaaggtgatttaagaagatctcgtgcagctgcagttaacatcgttcctaacagcacaggtgctgctaaagctatcggtcttgttattccggaactgaacggtaaacttatcggatctgctcagcgtgttcctaccccaacaggttctacaacaatcttaacagcagttgttgaaggaaacgtaacaaaagaacagatcaacgcagctatgaaagcagcttctaatgaatccttcggatacaacgaagatgaaatcgtatccagcgatatcgttggtatgagatttggttctctgttcgatgctactcagacaatggttcttccacttgagaatggcacaacagaagtacaggtagtttcctggtatgacaacgagaactcctacacaagccagatggttcgtacaatcaaacactttggtaaattactgaacgcttaattttcagtaagtgtaaaggaatagactccaacgaagggtccggtctgatttggaccggacctttttcgcgtggtctggaatgacagcaggaaatcaataagttactgtttacagatatgcagtaactgttaaagaatattattaaggaggcaccacaaatgctgaataaaaaatctgttgatgatatcaatgtaaaaggcaaaaaagttcttgtaagatgtgacttcaatgttcctcttcaggatggaaagatcacagatgagaaccgtctggttgcagctcttcctacaatcaagaagctgatcgctgacggcggaaaggttattctctgctcccaccttggaaaaccgaagggagagccgaaaccggaattatctcttgcaccggttgcaaaacgtctttccgaattattaggacaggaagttaagtttgcagcagatcctgaagtagtaggacctaacgcaaaagcagcagtagctgagatgaaagacggagatgttatcttacttgagaacacacgttatcgcgcagaagaaacaaagaacggagacgaattcagcaaagaacttgcttctctttgtgatgtatttgttaatgatgcatttggtacagctcacagagcacactgctctaatgttggtgtgaccaaatatgttgatacagcagttgttggttacttaatgcagaaggaaatcgatttccttggaaatgcagtgaacaatcctgagagaccgtttgttgctatccttggcggagctaaggtttccagcaagatttctgtaatcaataaccttcttgataaagtagatactcttatcattggtggtggtatgtcttacacattctcaaaagctatgggtggacatatcggaacatctctttgtgaggatgattatcttcagtatgcattggacatgatgaagaaagcagaagacaaaggtgtgaaacttcttcttcctgtagataacagaattggtgacagcttctccaatgactgcaatattcaggttgtgaaacgtggtgagatcccggatggctgggaaggaatggatatcggaccggaaacagagaagcttttcgctgacgctgtaaaagatgctaagacagttgtttggaacggaccgatgggctgcttcgaaatgccaaacttcgctcatggtacagaagctgttgcaaaagcacttgctgaaacagatgccacaactattatcggtggtggtgattctgcagctgcagttaacatccttggttatggcgacaagatgacacacatctccacaggtggcggtgcatctcttgaattcctggaaggaaaagaactcccgggtgttgcagcagcaaacgataaataagaatataataacatcccacagggatactaaggagataaatcatcatggcaagaaagaaaattatcgctggtaactggaaaatgaacatgacaccaagcgaagccgttaaattagtagaaacattaaaaccattagtagttaacgatgaagtagacgtagtattctgcgtacctgcaatcgatatcatcccggttgtagaagctgctaagggaacaaacatccaggttggtgctgagaacatgtacttcgaagagaaaggtgcatacacaggagaaatctcccctgcaatgctcgtagatgccggagttaaatatgttgttctcggacattccgaaagaagagaatacttcggagaaacaaacgaagatgttaacaagaaagttctcaaagctttcgaacatggaattacacctatcatgtgctgtggcgaaactcttactcagagagaacagggcgtgacaatggatttcatccgtcagcaggttaaagttggattccagggtgttacagcagatcaggctaagacagcagttatcgcttacgagccaatctgggcaatcggaacaggtaaaacagctacaactgagcaggctcaggaagtatgcgcaggtattcgtgcatgcatcgctgaaatctatgatgaagcaacagcagaagcaatccgtatccagtatggcggatctgtaaatcctgcaacagcacctgacttattcgttcagaacgatatcgatggcggccttgtaggtggtgcttctctgaaagctgatttcggaaagatcgtaaactacaaataagaataaaaaactgattataagcagataatctttgtgtccaaacgagaaataatataatgcccctgaatacaggaaaattggtaattttactgattggattgtattcaggggattgttatagttgaagcaggtaagttacctgctctaattgctgttgtgaatatttgtttggctatgtcagacacatagtatcttatgaaattaatatgtataaagaaaaagacagcttcattactgaaactgtcttttttatctggtgtaaaaatctgctgtaagctgtttcttttgtactttgggtaaatctcttttgcacgaaaggaatgcctcgatacttttgtattttgactatttatcaggtgtatttagttcatgtattttatcttttgtattttggagtatttctgagtttttatccttggtgatataaatttttttctctttggcaattcgatgattttctcttttgtatgtacaaactatatcatatttttctacattcgtctacaagtttcaacagaaatcagtcaaaaacatttcgacagaatccctgctttttcgacattcggagaggaaattgacagataaataaagattgtctgattgcgggaatccattttcgctgatataatgtaaaaaatgtgtaattatagaaagcaggttaatattttatggaagaaaaagtaacaaaatgtagtgtatcaaagaaatgcggaagctgccagtatcagggtgttccttataaagaacagcttgccgccaagcagaaaaggatgaagaagcttcttggaaagtttgcaaatgtaaaaccaatcattggaatggatgatcccttttattatagaaataaagttcatgcagtatttgacagggataaaaaaggtaatattatctgtggaacctacgaagcgaaaacacataaggttgttccgatagaagagtgcatgatcgaggataagatcagtcaggaaatcatccgtacaattcgggatatgctgaaatcttttagaatcaaaacatatgatgaggacacaggatatggacttttgcgccatgtgctggtgagaagagggttttccacagatgagatcatggtggttcttgtgattggttccccgatctttccttcaaaaaataattttgtgaaagctctgagaaagaaatacccacagattacaacagttgtgcttaacgtcaatgataagaagaccagtatggtactgggtgagcgtgatatcgtcatttatggaaaaggatatatccgggatacgctctgcggatgtacattccgcatttctccgcagtctttttatcaggtaaatcctgtacagacagaaattctgtataagacagcaattgaatatgcggggcttggacgaaaagaaacagtgatagatgcatactgcggaataggaacaatcggacttgtagctgcaaagcgggcaaagaatgtcattggtgtggaattaaatccggatgcagtccgcgatgccagaatcaatgcaaaggaaaataagattacaaatgcacgtttctatcagggagatgcaggagaatttatggaaaacatggcagaaaacggagaacatgcagatgttgtgtttatggatccgccacgtaccggcagtgataaaaagtttatgtcctccgttatcaaactgaatccatcaagaatcgtatatatctcctgtggaccggaaacactggcaagagatctggagtatttgacaaaacatggctatgatgtgagaaaaatacagccggtagatatgttcagttttacagaccattgtgaaaatatttgtcttttgacgaaaaaatttgagaaacagacgaaaaatcaaaacgaatacaaatactaaaagaatataaataccaaaagaaaaggaaggtttcatggaaataagaaaagcatcagtgcaggatcttgggcagatcatgcaagtttatgataaagcccgcaaatttatgagagaaaatggcaatgcagaacagtggggtgaagattacccctcagcagaactgatagagcatgatattgataaaatgtatctgtgcatgtcagaagggcggattgcctgtgttttctattatgcggcggaagaagatgaagattataaagaaattaatggaaaatggctgaatgaagaaccctatggagtagttcacagggtagcgtccacaggaatagtaagaggagccgcatcattctgtctggactgggcctatgctcagacacagaatctccgtatggatacatacagcgataacatccccatgcagaaacttctggaaaaatgcggatttcagtactgcggttcatttgaacgtctgggaatggataaatggatggcataccagaaaatataataaacaagtccctatctgtttcaactgtaagagacagatggggactttaaggttattgattgctgtagttggaggtatccatcagaagaaatccggtcttttacagattctcaacaatctggcgtgctacatatacaccgcttgcagaagcatgggacagggaatgggttacaccgcttccgtctccaatgatatacaggcctttgtatctgctttccagattttcatcaatatcaacttccatattatagaacttaacctccacaccatagaggagggtgtcgtcattagctgtcccgggagcgattttatccagagcataaatcatttcaatgattccgtcaaggatacgtttcgggagaacaagactcagatcaccgggagtagctgcgagagtaggtcgtaccataccttcttcgatacgtgcaaccgtactccttcttccgcgcaccagatcgccgaaacgctgtacgatcactccgccgcccagcatattggaaagacgggcaatgctttcgccatatccattactgtctttaaatggctcggagaaatgtttggctaccaacagtgcgaagtttgtattttctgtctgtttggacggatcttcatagctgtgtccatttgctgtgacaatgccgtttgtattttcgtttacaacgatgccataaggattcatacagaaagtcctcacattatcttcgaatttttctgttctgtagacaatcttactctcatacagttcgtctgtcaggtgtgagaagataacagcaggaagttctacacgtacacccaggtctacccggtttgatttggttgggatatcaagttctttacagatctgttccatccatttgcttccgcttctgcctacggatacaatgcatttgctgcagtcagtggtatcattctttgtgatgatacggtatctgtcttcaagtacttccagacgttctacaggagtgttgaaatgaaaatcaacatgctcttttaattttgcatataagttctcaagaaccacatagttaatgtctgttcccagatgacgtacggaagcatccagaagctttaatttgttctgcatacaaagttttttgaatttggttccggctgtagaatacatttttgtgtcctgtccgccgtaggcaacattgatctcatctacgtaacgcatcaggtcaagagcgtctttctttccaatatgttcataaagtgttccgccgaaatcatttgtgatattgtatttgccgtcagagaaagcaccggcaccgccaaagccgctcataatggcacaggttttacatttgatacaggtttttactttgtcaccatcaattgggcaatgtcttttactgagaggatttccagcctcaaaaacagcaatctttaaatcgttattttgcttcatcagttcataggcagagaaaataccgccaggtcctgcgccgatgatcactacatcatatttcatatatactacgatcctttcaggtaaaaatattttgtaaatctgcagcaagtctcctgaacgcactatttaactgataaattgcgaagcggatgatattatgcgcctgaagagaatgccatagataagtctgcgttactgagaacgaaggagacagtaataagtatatcataaataaatgaaaaaatcttatgtttttgtgaatggacttataggataacattataaataatgttttaaccgaatcaggtaagtcccctgtggagattgcgaatatccgcctgactttctgcaggatatgataagcaaaatatattatagatatgagaagatatcaggttaggggtaaaatacctttttccctaacataaaaaagaacaaatagttctataaaagggtacaactacaccatattgatgctgaacccgaaaaaattatttttcctcaggttcagcattatccggaatgtgttctacaatatcaccgaaatcgcagtcaaggattgaacataagatatcaagactgcggatttccacattttcattatgacggagtttatccagaaaagaagtgcttatgccatagtgagtgtacagggcatactggctgattttccgctccttcatagtcttccataattttctatagcttatcatatgtaataaccgtccgatttgttcttgattcatatttattatcgggttaaaataggtcttgtaacagtgtctttataaagacactattgagaaggaaagtgatataatgaagacgatcagaaagataatgaaaggcgtggccgcagcctgcatatcagtggcaatgtattactgcttcctgagtggagcccctgccagggggacagagagaactgtttatatgatcctggatggaatattctgtatttctgcctgggtggcaggagtggggatattatggtatgtgagatggcttcgcagacggaacaaagaactggaaaatatgataaagattttgcttaaaaatgcagacaaacttgacaaataggaaattctgccatactataaaaaccaacgaaaacgaaaggggaatcctgcaaaatgaatgaaaatgtcatcaaagccgcactgttaggatttggaacagtaggaacaggtgtatataaggtactgaagaatcaggaaaaggaaatgtcggccaagattggctgtaaagttgagataaagaaaatccttgtgagaaatatagagaaggcagcagcgaagatagaagatgcctctttgctcaccagccagtgggatgagattataaatgatccggagattgagattgtgattgaactgatgggtgggattaatcctgcaaaagagtatatcctttctgcattaaaagccggtaagcatgtagtctctgcaaacaaggatctgatcgcagtacatggtcatgagcttctggatgcggcacatgagagtaaagtggattttctgtttgaagcagcagtagcaggtggtattccgatcatcagaccattgaaacagtgtctggcaggaaatcacatgacagaagttatgggtattgtaaacggaaccacaaactttattctgacaaagatgactcaggaaggtatggagtttaaggatgccctggcacttgcaacagaacttggatatgcggaggctgatccgactgctgatatcgaaggtctggatgcaggacgtaaggtagcgatccttgcatctgtggcatttaactcacgtgtggtatttaacgatgtatatacagagggaattgccaagatcacatcaaaagatattcattatgcgaaagaaatgggacgtgatatcaagcttctgggtgttgcaagaaacgaagcagacggaattgaagcatatgtgtgcccgatgctaatccccagttcccatccgcttgcaactgtaaatgattcctataatgcagtatttgtccatggagatgcagtggaagatgccatgttcttcggaagaggagcaggagaacttcctacagccagtgcagttgtgggtgatgtatttgatattgtgagaaatattcttgcaggatgctgcggcagaatcggatgtacctgttacaagaatatccctgttaagaaaatggaagatacacataaccgttatttcctccgtctcaaagtagaggatcgctgcggtgttcttgccgagatgactgctatttttgccaaatatcaggtcagtgttgcacagattatccagaaagataccaaggtggaagggtgtgcggaagtagttgtgatcactgagaaggtaagagaaggtgattttagaactgccatcgaagaactgagaaacagggattccgtaagaaagatttcaacgatcattcgtgtatatggaaaataagttactgttcttttcatatatatagtaatgaaaatgaaacagatacaaaaaaagaattgaaaaatcctgagattttgatactatataagagatgtcagatataaaagttttattgtgcagagatgatcagttttctgctcctgatatcagcaaaacagttatcaattatgaataaacataaaaggagaacattatgagcaaaaaaccaaccgtattaatgattcttgatggatatggtctgaatgacaaaaaggaaggaaacgctgtatatctggctaaaacaccggttatggacaagctgatggcagaatatccatttgtaaaaggaaacgcaagcggactggcagtaggtcttccggacggacagatgggtaattctgaagtaggacatatgaatatgggcgcaggccgtatcgtatatcaggaacttaccagaatcacaaaagaaatccaggacggtgatttctttaagaatgaagctcttcttgcagcaatgaagaacgcaaaagagaataattctgcagtacatttcatgggacttctttctgatggtggtgtgcacagtcataatacacatctttatggattacttgagatggctaagagagagggcgttgagaaggtttacgtacattgtttccttgacggtcgtgacacacctcctgcatcaggtaaagagtttgtagaggctcttgaagcagagatgaagaagatcggtgtaggtgagattgctactgtttccggacgttactatgcgatggatcgtgataaccgctgggatcgtgtagaactggcatataatgctcttacatcaggagaaggcgtaaaaggaacagatgccccggcagcagttcaggcttcctatgataatgataagacagatgagtttgttcttcctacagttatcgagaaagacggacagccgacaggtgttgtatctgataaagattctgttgtattctttaacttccgtcctgaccgcgcacgtgagatcacaagagcattctgtgatgatgatttccagggatttgaaagaaaagcaagaccacaggttactttcgtatgctttacagattacgatgataccattcagaataaacaggttgcattccacaaggttcagcttcacaatacatttggcgagtatcttgcagcgcacaatatgactcaggcgcgtattgctgaaacagagaaatatgcacatgttacattcttcttcaatggcggtgtggaagagccgaacaaaggagaggacagaatcctggttaaatctccgaaggttgcaacttacgatcttcagccggaaatgagtgcacctcaggtttgcggaaaactggtagatgcgatcaaatctgacaaatatgatgtgattgtgattaactttgcaaacccggatatggttggacatacaggcgtacaggaagctgccatcaaagcagtggaaactgttgatgaatgtgttggcaaagcagtagaggctcttaaagaagtggacggacagatgtttatctgtgctgaccatggaaatgcagaacagctgatcgactatgagacaggtgctccgtggactgcacatacaacaaatcctgtaccattcattcttgtaaatgcagatccgaaatacacactgcgcgagaacggatgtcttgcagatatcgttcctacactgatccagcttatgggaatggaacagcctgtagaaatgacaggaaaatctcttcttgtagagaaataatataatacaaaaactgtgagaactgcttggcagacatcagcagttcgtgatattgacgaaaccctctgacacaaatcagagggttttttgtttgtttttggtgattatgtagaaaatcatggaattaaaaaacacatcttgaaatggaaaattttttcaactataatcgctctgatatctgataaaacagatatcgaaaacagcaaataaagaggattaaaaaaggattgggagggtttattggaatgcagacagacatgacagttgggaaaccaatgaagatgatacttgactttacgatacctgtatttataggtaatgtattccagcagttttacaacatggcagatgccataatcgtaggaaaatttgtaggaacaaaagggctggcagcggttggttcaacaggaacgatcatgtttctgatcataggttttcttacgggactgacagccggttttacagttctgacctcacagaaattcggtgcaggaaagatggatgagatgcgtcagtcagtgggaaatgcggcgttactttcaattatcatttcggttataatgacggctgtcagtatggtggggatgcactcgcttctgacattaatgcatacaccagaggatatttttcaggatgcatatacctacattatgatcatatgcggaggtatttttgcacaggtattatataatatcctggccagtattctgagagcactgggaaacagtaagacacccttgtatttcctgattctggcggcacttttgaatatagtacttgacctgacgtttattattgttttccatatgggagtcgccggggctgcctgggcaacgatcacagcacagggagtatccggagtgctttgcctgatttatatcataaaatgcgtaccggaattgaaactgaaggcagatgactggagatttcgttcagagattgccaaaaaagaaattcttgtgggcattcccatgggactgcagtattccatcactgcgatcggaaccatgatggtacagtctgcgctgaatattcttggttcctatgcagtagcggcatttacggcaggaaataagattgagaatatttttacccaggcatatgttgcaatcggaacaacaatggcaacatataatgcacagaatataggagcgcgtaaactggacagagtcagacagggatttaacagtgcgcatattataggaattacctatgccattgttacaggtgtgattattttcttctttggcaaatatctgtcttatctgtttatttcagataatgccgcagaagtcattcctatggttgatacttatgtgaaatgcgtggcagtatttttcataccacttcattttgtcaatgccctcaggaatggtatccagggcatgggatacgggctgcttccaatgcttgccggtgttgcagaactggcaggacgtggaatcaccgctatgatcgcggcagctcataagagttattttggagcatgtatggccagtccgatggcatgggtgcttgccggaggacttttgatcgtcatgtatttctatgtgatgaaggatatgaaacgcagacttggcctgtaaaaataagaaaaatcacaagggatttgccaaagaaaacatttttcggggatattacctgcaaacagtaataaaaaatgagaaaaaggtgaatagtaggtgcaaattggaagaattatgttataatgaaacatgcagcgcaggtttatgtgatcagtacataaattctgtgtattgtgaagcgtattattaagaattatagcaagcctcttaattaaccgaatcaacagtaatatgattcagaagtaataggcttcaggaaaaatgaacggtaacatttatgttgaggagaaaatagatgggcaacaaagaggaaaaaaacaacacagtcccaaatggcagtatggaaataactggcagacgccataaatccgcaagaccggggagaatttcgtatgtaccgatcagtgatgaagatcttgcaccttatgaaccgcctgttcgcaagaagcataaaggattaaaaattacaggaatcgcagtggcaatggttattgtaagtgccggagccgcatatgcaggtatgtcatattattattcggataaattctttgaaggaacatcgatcaatggcattgactgttcaggtaaaactgcttatgaggcagaacagaagattgcgaagacagtagagaattattccatagaggttgattccagaaatctggatccgcagacgatcagcggagatcagatcggctatagttatgtttctgatggaagtgttctgaaacttctgaaagatcagaaaccttatgaatggatcagaggtttttttgaaaagaagagctatacagccgctgagaacacgacttacgataaagaaaagctgaaaaaacaggtgaaggcacttaactgtgcacagaaagagaatcaggtagctcctgagaatgcatatgtcgcatatggagattcgcagtttgagattgttccggagacagagggaagtaagctggatttgaaaaatgcttataacgtgctttcggaagctgtttcgggaaataagacttcggttgatttcgacagtgagccggacgtgtatgtaaaagcagatatcaccagcgacaatccggatctgcaggcgtctcttaatgcatgtaacaatttcacaaaagcaagcattacgtatacttttggagatgaaacggaaactctggatggaaatacgatcaaggactggctgaattttgatgaaaaaggacagctgatcatggatgatacatctttcagacagcacatcgcagattatgtggcgcagcttgcagcggcccatgatacggtgggaactgaaagagagttccagacaacaagtgggagaactgtcagtgtatacggttctgcatatggatggcagatagaccagacttcagaggttgcacagctgacacaggaaatccagtcagggacacagacaaccagagagccggtttattctatgacagccaatgcacatggttacaatgatataggaaatacttatattgaagtggatctgtccgaacagcatatgtatttctaccagaacggagaagatatctttgagtcagatattgtttccggtgatatgagatattctgaccgtcagactccggccggtatttatacgatttattataagaagagcccggatgtgctcagaggtaaacagctggcaaacggtaaatacgaatatgaacagccggtaacgtactggatgccgtttaatggcggtattggtttccacgatgcaaactggcagccatactttggtggagatcgtttcatggaaggcggttcgcatggatgtatcaatatgccgccggagaaagcagcagaactttataatattattgactgcaatattccaatcgtatgtttctattaatattgatcaggaattacttttctttaatcttttaattggaggcattgaacagttttctgaaaaataaaaacaggtatggatattccgggatcattgtatacgaaacaatattcccggatttctataaaaagaaaaaaggttctgtatggtaaaatgcagaaagaaaggggaaggttatgaattttgattctttaaacatcatactgacaattgccgctttcatagtaggaataatgcttctgacaggacatggggatattttcctgaaaggtggaaactcggacatcagtaagaagctttatgatgaagagaagatggcaaaagcaagtggagttgcgcttattttgattggcgttgtttctgctatagatctttttactacagcactggcctttaaaatagcttacatagcagcacttctgatcattattgtcgggcttgtgtgttatttgagattaaaatgtaaaaaataatgaataaggcaagaaggatcgagatacggtaaaatgtgtacggtcctttttatttttatgtattagcgtttttttctgttttgtgataaaatgacatacaggccaaaatccaattgccacaggtaatctgaaatgaattttggcggcgttactgagaatggagtgaacagtaaataaacgaggaaaagataaattatggtacttgaagagattgtgcagcctctggtaaaatggtacagggataataagaggattcttccatggagagataaggacaatgcttattatacatgggtgtcggagattatgctgcagcaaaccagagtggaggcagtgaaaccctattttcagagatttatcacagaactcccggatattcagtcactggcggaatgtcctgaagagaaacttctgaagttatgggagggactgggatattataaccgcgttcggaacatgcaggaagcggcgaaaactgtaaaagatgaatataatggcagactgcctgaagattatcaggcacttttgtcgttaaagggaataggaagttatacagccggtgccattgcatcgatcgcatatggggaaaaggttccggctgtagacgggaatgtactgcgtgtgatttccagaattacagagagtacggaagacatcagccggcagtctgtccgcagaaaaatagaacagcaggtttcgcagatcatgccctcagattgtccgggagactttaatcaggcactgatggaactgggagctgtgatatgtgttcccaacggtcaggcgaaatgtgcagaatgtccgattgcatttacctgtctggctcacagacatgataaagcggatatgattcctgtaaaagcacctaagaaagccagaacacaggacaacaggactgtgtttatcattcaggacggagaatgcacagctatcaggaaaagacctgagaaaggacttttggcaggcttatatgaactgccaaatactcagggacatttaaaaagcgaagatgcgcttttgtacgtaaaagagttgggacttgatccattatatatagaagaacttccgcctgcgaaacatattttctcccatattgaatggagaatgcaggcatacagaataaaggtatcatccctaaagacaacacaggataaagaactcatttttgtaagtaaagaacagtcaggtaaacaatacgcaattccatctgcttttggagcgtatgcaaagtatatcaaggaggaaacaagatgaaactgttaagtattgcgattccatgttataattcccaggattatatggagaattgtatagagtcattactggtgggaggagaagaagtagagattcttatagtagatgacggatcttctgacagaactgctgagattgcagatgcttatgccaggaaatatccgacaattgtaaaggcaattcatcaggaaaacggcggtcatggagaagctgtcaatgcaggaatcagaaatgctacaggattgtatttcaaggtagtggacagtgatgactgggtaaataaagaagcatatgtacagattctgaaaactttatatgaactgctcagaggtccgcagacagttgaccttctgatcagtaatttcgtatatgagaaacagggcgcaacccgtaagaaaatcatgcagtaccgcaaatgcctgccgcaggacagaatatttggatgggaagaagtgaaacatatgccgaaaggtaaatatcttctgatgcactccatgatctatcgtacaaaactgcttcatgaatgcaatctggaactgccgaagcatacattttatgtagacaatctatttgcttttgaacctcttccgtatgtaaagaatctgtattatctggatgtgaatttctaccgttattttatcgggagagatgaccagtctgtaaatgagaaagtgatgatcaaacgtattgaccagcagatccgggtaaacaaactcatggtagatgcatatatcaactgtaaaaatacaaataagcagttgaaagcgtatatgttcagctatctggatattattacaactatttcttccattatgctgatacgtgccaatacagaagagtcccttcagaagaagaaagaacttctggaatatatcaggacagagaataaacaggtatacagaaaactgcgtcacagtcttttcggaagagtcatgaaccttccgggaagaggtggaagaaaaatgtcagtggcagcctacaaaatcagccagaaattctatggatttaactgatgcgtaaaagcttcacatccggatatcggttttgggaaaatattttatgaaattgttataactgtaaaaaagcagaatctctgaaagacaaaaatgtacttcaaagattctgctttttttaaatctttctaattctcgctcttttttctctttacttctctaaagcagacagattcagaagaaacggaaactcttctcggataaaaaaccagaaagccaaacaatgcaagtgttgcacccatgcatacatcgatcacagaatgctgtttcaggaacatggtggacatgatgatcagcgcggtcagggtaaaggatgctgcttttataaattttttatttcgcagtgtttcgcagtttgtaagcgacatatgtattgcaagagagttgaacacatgaatgctgggcaggatattcgtaggagtatctgtactgtacagccattttactatatctgtgaagatattgtctcttggaaattcggtcggacgtatgtgctgagcatttggataaacataggaaacaatcaggaaaacagtcattcccatcataagattaaatgccagctgatagtattcatgtttgtttttgttaaaaaatataaaataaatcacagccaggatcatgtatggaaaccacagcatataaggaacgataaagaactcacaaaatggaatccagtcatcaaatactgtatgtacgatatgatagctgtgaaccggtctgtgctccaggtaactgaagagcaggatataaatgatgctgtaaacagcaatcacaagtccatgccggtatttggaaataaaacgtttcaaaatttcaccttctttggagaattatttcataccataccatatcataacatcttcatactgcttttacaaataaattttctcataaagtatataaaaattttataaaaaaattctcaataaagtgtagcgttttacaaagttttaacataaagcagaacaaagattttacggctttttattatactgatatcaactgagccggagaaattatagtgattttcgaaaacgtcatgttgtttccggagattgtatactggtttcggcttatggcattcagcaaataattgtaaatggagaacaaaaaaatgatatatttggtagaagatgatgagagtatccgcgaactggtgatctatacactgaagagtcagggatttgaagcaaaaggatttgaaagaccttctcacttctggaaagccctggaaaaggaaaaacctgcacttctgctccttgatgtgatgctgccggaagaggatgggatttccatattgaagaaattgcgtatgcgtccggatacacgtaaacttcctattatcatgctgacagcaaaaagcagtgaatatgatacagtggtaggtcttgacagcggggcagatgactatattccaaaaccgttccgcatgatggaactgatctcaaggatccgcgcattattaagaagaacagaagatgacggcgcagaagaatatcagacaggaaacctttatgtctgcccttccagacatattgcaactgtagataaaaagaatgtaaatcttacattaaaagaatatgaagtattatgtctgcttctgaaaaacagcggaactgtactttccagaacccagcttctgaatcaggtatgggggtatgaattcgacggagagagcagaaccgttgatgtacacatccgaacactgagacaaaaactgggaagtgccggtgagctggtggagacagttcgtggagtcggatataaaattaatatgaaataaagttaaagaataactggaaacaggaatttatctatgctatacttttaaatatgagaattgcaggagttgcaaagagcaaagcaaaatagcttttgatcctgacatcttaaatataagcagatgccaaaaataaatggacagctgcccgaaatcaacggtcagggatatcagaaaccctgactgtagatttttataaggagttatttattttatgaaatcattagtaatagcagagaaaccttctgttgccagagatattgccagagtacttcactgtacacagaaaggaaatggtacttttgagggaaaagattacgtagtcacctgggcacttggacaccttgttacgctggcagatcctgaggaatacgataagaagtatatgaaatgggaaatatccacacttcccatgatgccggatcgaatgaagctggtagttattcgacagaccggtaaacagtacaatgcagtaaaaacgcagctgtacagaaaagacataaacgacattataatagccacagatgccggaagagaaggtgaactggtagcccgctggattcttgacaaagcggactgtcataaaccaatccgcagactgtggatttcttcagttacagacaaagctatcaaagaaggattcggaaatctgaaaaacggacatgagtatgataatctgtacagagcagctgtggcaagagcggaagctgactggctggtgggaatgaacggtacaagggcacttacctgtaaatataatgcccagctttcctgcgggcgtgtacagactcctacactggcgatgattgcgaaacgggaagaagagatacgggcatttaagccgaaggaatattacggaatcaccctgaaagcaggtgatatcacctggacatggaaggaaccaaagagtaagagcttcagaacttttaataaagaacgggcagaggagatttctgatgttctcagaaatcagtctctggaagtaacttccgtaaccagcaaagagaaaaaatcctttgcaccgggtttgtatgacctgaccacactgcagagagaggcaaatcggaaatatggatattctgcaaagcagactctgaatatcatgcagcgtctgtatgaaaatcacaaagtactcacttatccgaggacagattccagatatattggaaaggatattgttcctacaattaaagaacgactgagagcctgcgcaacaggaccgtacagaaaaccggcaggcgcactgatgaatcagcctgttcgtgcaaatggaagttttgtggatgataaaaaggtcagcgaccatcatgcaattatccctacggagcagtttgtgcagcttgaccatatgacaaatgaagaacgtaagatttacgatatggtagttcgcagattcctcagtgtgctgtatccgccttttgtttatgaacaggtgagcatggagggaattgttgctggagaactttttgctgccagcgggaaagttgtaaaaagtgccggatggaaagatgtgtatgaaaatacggacgacactgaagaggatgaggatactgctgacgatgcgcagaaactgaaagatcagaagcttccacagatgaagaaaggtgagagactgcatatagagaatgtatccatgaatacaggcaggacaaagccacctgcaagattcacagaagcaacgcttcttgcagcaatggagaatccggtgcgctatatggagagtcatgatacaaaggcagcgaaaactctcggtgagacaggtggtctggggactgttgccacaagggccgatattattgagaaactgtttaacagctttctgatggagaaaaaaggcaatgaaatccatctgacctccaaggcaaagcagcttctggaactggtacccgaggaactgcgcaagccggaactgaccgcagactgggagatgaagcttggaaatattgcaaaaggtaaaatgaaacaggaaaccttcctgaaagaaatcaggaactatacctgtgacattgtagatgagatcaaaaccggacagggaaccttcaggcatgataatcttacaaacaaaatctgcccgaactgcggaaagaagcttctggcagtgaatggaaagaatgcaaaaatgcttgtatgtcaggacagagagtgcggttataaagaaaccctgtccagaactaccaatgcccgttgtcccaagtgtcataaacgtatggaaatgtatgtgaaaggtaaggaagagacatttatctgtgcctgcggctataaagaaaagctctctgcttttcaggcgagaagagccaaagagggagcaggagtcaataagcgtgaggttcaaaaatatatgagacagcagcagaaagaagccaaggagccggtgaataatgcatttgcacaggcactggcaggattaaaactggaataactatatcactctcttgtctgcgaatccgcattctatgcgatgggtatagttatttacgaaacgatgtaccaggtaaaataaaaaagaagggaagataatattatggcagtacaggatgatcatatgataagaaatattcaggacgtaggaagactgatcgcgaagcttctgcttcatgagcagcagcccaattacaaacttccggagaaggaagcagattacacagaggcagaccggctttttgctacaattatgaaactggcagaagaaggcaagatcaatgaagcagaaaacgaattatatatgggtatggtagaagatgatgtagattatctggaactggcactgaccttttatctgtatctgaatgatatggatggagatttcctggatgataacggatattcaagggaggaagttttggaaggtatgaaagatcttgcttcagactggggtgttacaggattagaggctttttgagagaaaggaaaaagcatagcatatgcgcagagaacagacactggaagagatttcggatggtaaattatatgattctaatgatatggtaaaggcagactgccatgactgtgaaggctgctgtgactgttgtcagggaatgggagattctgtgctcctggatccatatgatgtatacagattgtcggcaggattacagaaatcagcagagcagcttttacaggaatatctggaactgggagtgacagatggaaatatccttccgcatcttcggatgacaggagttaaggaacagtgtatattccttaacagtgaaggacgctgtcacatccactctattcggccgggattctgcagattattcccgctgggaagattctacgagaatggcagttttaaatatattcttcagattcacgaatgtcctaaaacaaaccgcagtaagatcaaggtaaagaagtgggtggacacaccggatctgaaaaaatatgagaaatttgtaaatgactggcattattttctgctggatgtgcaggaagtactgtacaatgctgaggatccagatctgatcagaaatctgaacctctttgtggtgaacagattctatctcaaaccatatgatcaaaatcaggatttctacatacagttttatgagagactgaaagaaggaaaagaattgctagcattggcgtaggagagacatatgagttatcagaacgaatggcttctttttgaggcagaagatgagtttgatgaaattaagcacagagaaccgacagaggaattattgttctatcgtgcagttgcaagtggagatataaaaactgttaagaagaattgtgaacggcagagatttacagagtgtgatggtgtgggagtactgtcaaagaatgcggtcacaaatatgaaatatcattttgttatcactaccgcaatgataaccagactctgtaaacaaaatggaatggagatggaacaggcatttcgcttgagtgatttttatattcaaaagctggatggcattcatacagtagaagaggttcagagccttcatgatgagatggtgatggattatactgaaaaaatgcgcagatatttcagagacaacacttattctaaacatatcaacgcaagtaaagaatacatttattctcatatcaaagaacgaattacaatagaagatcttgcagattcacttggagtatctgcgagctatctctccagattatttaaaaaagaaacaggaatatcggtcagtgcctatatccgcagacagaagatagaaatggcgaaaaatcttttgcagtacagtgattatccgatcattgagattgcaaaccgtctttccttttcttcccagagtcatttcatccagcagtttagggaagttacgggaatgacaccgggtaaatacagggatgaacattatatgatacactgggatatagaaaaagaactttgtgtcgcatcagagtcggaactgaaaaaagaacaggattaatcaaaatattaagataagtaaaacaggcggctagagcgtgtctgaaaaaggctttctgcaagatgtgcgtcacaatttgtggtatattttgcccggatgagggcgccgtagcgggctacggcaactgaattcgggtgaaatatcccgcaaagtggggcgtgcagattgcgggaatgatttttcagacacgctctagcttacagggaatataaattttctgtaagccggccgcttattttcatctggtaatatcgggggattaaagagttaatatgacttcgttcttatcctgaagaagtttttcagggatataattatctgctaatttctgtccgttaagaaccagactgcagcagccagattctttttcgtctggattttctacagagatatgaagctgttttccacggaaaactttctcaatctcaaagtgtttccagctttttggcacagaaggagacagtcgaagtccttcaagatcagggcgaagtccgaggataccttccacacatcctaccattacagtagaagcagttcctgtcagccagtgaacatgagagcgtccaaagtgtttgcttgcttttccctctgtaaactgaccatagcagtatggttcaagacgacggatttcggcacagtcattctgcgcagcaggagaattttccataaaataagtaaaagcacgttctccatgaccgcggagtgcttcagcaagaatcagccagccctgggattgggagaaaataccggagttttctttggttccctgattatagataactgccagtgcaccatcgaaagcatgcgcatgataaggcggatccataaggatcgcaccatattttgtgtttagacgttcgtatacattgttcagtgcagcgtctccctgttcagagctggcaagaccactgatgacagcccagctctgaggattcagccacatatttgcttcaggagcagcagcttcaccgattctttctcctgattctgtataaccacgtacgaagcggtcgttatcccagcacagttcctgaactttttcgccaaatgctttctgagtttcttcaagatactgtacatattctgtatcttttttatattcggcaaagattttcaggattgtcattgcataatagaactgtaaagcaacaaaagaagattctccgtttgcacccagacggagacagtcattccagtctgcataaagtccggcgggcattccatgaggtccaaggtgattaagagagaaagcaaccgcacgtttcagatgttcatatacagtagcttcatctttgttggcaaaaggaatcacttcatcaagaaaagcagtgtttccggtttctgaaatatatttatatacagttgggaaaagccataatgcatcatcagcacggtaagccggatggccggtttcctgtacataagaagcatcatccggagtatcttcttttcctggtgtgtgagtaaacttgacaagagggagtccgccaccgttatttacctgcgcagacagcatgaaacgaatcttttccagtgccatttccggtgccagatggatgattccctgaatatcctgtacagtatctctgtatccgtatccatttctgagtccacagtaaatgaaggaagctgcacgggaccagatgaaagtcataaaacagttgtatgcgttccaggtattaatcatagtatcaaattccggacttggagtgctgactttaagattatcaagcttactgttccagtcagcttttaatgcttccagttcttctgctacagttggagccggattttcgtaacatctgattacttcagcagcttcagatgacggtttcattccaagaagaaaagcaattgttctggtttcacctgctttaagagttattttgcaggagagagcaccacaggagttttcattatagcttgtcttattaccaagatcaccacagacaataccttcagggtttccatatccatggtaacttccgagaaattcatttttgtccccacagtaagaagaaacctcagcacctgcaagtccaaagaaacgttctgtcacatttttctcatctacattctcattttcaggaattgcatcaagatttccatgaatctgctgagtaattctgtttccttcgaacagtgtacgagaaataaaaagagagtactgtaaattaacctgatcctgttcgtaattgctgtggttggtaaactctgcatatccgctgagagtcaggttcctttcgtgatcagaatgattggtcacagataatgcccatacttcataactttttccaagaggaacatagtaaagggcttctgagtgaatatcgctgtagtcggcagaaatttttgtataaccgattccgtgacggcattcgctcttatactgagccagatctttgcctgcaggctgccaggatgcagaccagaagtctgatgatctgtcatcgcgaatgtaaatgtaacgtcccggctggtcaaagttattaaaaacatagcgcaggatacgtccgtttgcaccggattttgcaaaactgtagccccctgcattattggaaatgattgcaccgtactccggggaacccagatagtttacccatggtgcaggtgttgccggattagtaatcacgtattctcggttttcattgtcaaaatatccgtatttcatatagtaaatcctttctgttagaacaatatttataactgcctgtcgactgcttttatggaggctgagcagctattgttttcaggcaagtgtcactgtaatttcatgaagatcagaagagaggttgttaataaattctctggagatcataatatgggaatcttctacgatttctattgctgttttgtcgcagtccgcagcggcgatatgataagaaccataatcttttctgtctgtgtttcggtaggtaacatggaactgttttcctgcaaaagtaacagagacagaagcagttcctgcttcatcgaactgttctgccagaagttttggatgaaccagaaggtttccgaaaactccacggacaccaaagacctctgtgatcatggtaaaaagataccagcttgcagcacctgtcagataatgatacatgccacgtccgtctgaacggaaatattcaggaattcccgggtaaatatggctggtatcaaagtcgagagctgtatcagacagagaacgtaatgctttccagccttcttttgcaaagcctctctgatataaggcatttgcatacataactgccatatgagagaaaacagcaccgttttctttttcgccataagcgaaaccgaacatacgtcccatatcaaacttcagttcctgaaaatctgtgttcaggcggtaaccgccaatttcttttctgtaaagataatgatctgcgctttttacgatttttctaatttgcgcatcagtggcaacatttcccataatagagaaaacctggcccgtgagcatcatacgcacctgctcatggtggaaaccttccactgcctctccatgattatcgtaatagctgttataccatccttcttcgctgtctttgccatcaatccattcctgtgaacggatatgatctgtcagccagttggatttctggatcaggttggcagcaagtgtggagagagagaagtttttctttctgccgcttaggttatgcctgcagcttttggcatattcagtaagaatctttttcttttcagatacactgtcaaacatatctgtctgatcgttcagcaggatttcaatttcctctgacagcgggatactggtttcgcctgcagattccataaggcgtaatatggaagcaagagtatggagattgcccgcataagcacaggtaaaggcaacactttcaccattttctgctgccatatccagggcatcgttccagtcagctccgcggagacggtaaatattatgaatacctacatcataaaaagcggcaagctgctggatcagaatgtgctccagaacacttccggtatatacctgaccgtcttcggtgcgctgtttatttccatatgcgtcattccagagagtatcaatttctgtgccgcgcatggtttgtgcatctttaaaataaggaacctgtttcttaaggatctctatatctccggtctgattaatataaagactggtcgtgattagcggccagagtgcatgatccatccatacacgtgcgattccgtttctgtcagcgataaaattgccgtcaccgtctccgataatagtagcatttgtaccatcaatacgtacgccgccataattcttttcaatcatggcacctacattctgaggattcatcagcagaagagaaagacaatcctgccacagatcacgccatccgcgtccaccacgtccgtaatcatgatgaggaaggaaagaacagccaaataaacggcgcaggaatggctggaaacttacccatttcatataactgtcaaagtcaggatcctgtgtgtggaagtcaacgtttacctgttttttccagtaaattctggtttcttccagtgcattttttactttatcggaagtattgtatttttcaaaaatattttcaatttcttctttactgtcggcaatacctgataataaaataaagtctgttttttcaccgggagccagtgtgaaagatgagaaacagaaagcacccattgcttcctttcctgctgccagactgtgtgcgggaactcctttatatccttcatatactgtgcgtggatgtgtataggtaccaccttctccgataaaatcttctacagtcggataataggaaatcggattttctccctttccggaacagccatttacataatagattttatgatttggctgatgtccccgctcgtcaaatgacatggtggggcagacgttgattccatgttctgttgtctcgatacgatggagcatggaagtgacatttcgatgatcacgaatgttatccgcacttcttccgtaaacaggaattgcaccatatgcagtaaatttctgtacagtatctgtctggttttcaaccgtcacatacataatctccacattatcacttttggggataaaagaagtaactgtggagatgagcccaagttctctggaagtccttttcaaagtctgccacatgaatccggcggttagttcactgtcttcctgcctgtcagtaaaacggtcggcttcctgctgagcagaggaacctgttactgaataaggaatgtgtccttcttttacgatccagaaatttctggaagaacgattgttatgaagattttcggaactgaccggttccagcaggaaggtatcctgatcaattttgctgtcacctccaagcactggtgtgacggaacttttcagacctgcttctgatgcaagaggaaaataaagataactggtattttccggtctgttcacacaaaagcttccatgattatcaataaacttaatatgtttcaacatttttctccttccataaatattgtatggaaattatatcggaaatgagatctttcggaaataagaaacatgaagtaagtatcagaatcatgacataaaataacacaatttcagaaaaatatatgagcaggtaatgaatcagattgcgaatattcatctggctgatttatagaaaaatggtactttttatacaaaagtactaataaaaaaacagaaagattatgattttaggaaagatttccttattaaatgacaaaatctgtctgtatataaaaagaacacaatgaggtcatgaatctgacattttggtggaaattataatatacccgaaaagcagcttaagctataatctaatacatcaggtgaggcaagaaactcacaaagagaaaaaaagaaaaaggagggcttttttaatgaaaaagaaagcattagctgttttacttacagcatccttaattgcaggtacaatgggcggaaccgctacaatcgtacatgcagatgaagaaggaaaagtaatcaatatttattcctggaatgatgaattccgtcagcgtctggaagcagtatatcctgaagtaaaagaaacatccaaagacggaacagtaacaacattaaacgatggaacagaaattcactggatcataaatccaaatcaggatggtgtttatcagcagaaacttgatgaagctcttatgaatcaggctgatgcatcagcagatgataaggtagatatcttcttatcagaaacagattatgtatacaaatatacagatgcagcagcggatgtggcaatgcctctgacagatcttggaattgatcctgacaaagatcttgcagatcagtatgactttacaaaaacaactgcatctgatgcagatggagtacagagaggatctacatggcagtgctgccctggacttcttgtatatcgtcgtgatattgccaaagatgtgttcggaaccgacgatcctgaagaagtaggcaagaaaatgaaagactgggatacagcaaaagctacagctgaagaactgaaagcaaaaggatattacacatttgcttcttatgctgatacattcagactgtatggaaacagcatttcccagccatgggtagaagacggtgcaacaactgttaacgtagaccagcaggtaatgaactggatcaaagattccaaagaatggctggatgcaggatacctgaacaaaactgtaaaaggtcagtggaatgatgactggaacaaagctatgggatctgaatccaaagtatttgcattcctcttcccggcatggggaattgactttacattgaaaccaaactgggatggagaagacggagaatgggctgttacaaatccaccacaggaatacaattggggcggttcttacatccatgcagcaacaggaacagataatccggaacatgcaaaagatatcattcttgcactgacaggaaataaggacaatttattaaagatttccaaagattattctgactttacaaatacaaagagtggtatgcaggaagttgcaaaagatgatactttcgcatctgacttccttggcggacagaatccatttacatatttctcaccggttgcagagaacatcaagatcgcaccactttctgcttatgaccagggctgcgtagaactgatccagaacgctttcagcgattacttccagggtcaggtagactatgacaaagcaaaatcaaactttgaaacagcaatcaaagaacgttatccggaaatccaggaagttaactgggctgaataataaacgcttttgaattgacagttaaaaagtttcaggtgtaaataacctgtacagatgcatttgtatttgccagacacgcatgaaagagatgtgtgtctggcactaatatgtaaaggaaggaatgctgaactatgaaaaaaaagaaaagcatcagctatgcaaaatggggatacatctttatccttccattttttataacttttttaatcttttctttgattccgctggtagatactgtacgttatagtttctatgaatattatcgttcaggaattaaagaaatcggaccgaattttattggaattgcaaactatctgagtctgttgaagtcagatatgctcaaatacagtactaatacgctgattctgtgggtaatcggatttgtaccgcagatcgtgatcgcactggttctggcatgctggtttacagatgcgcgtctgaagatccatggacagcagtttttcaaggttgttatttatcttcctaacctgatcatggcttctgcgtttgcattattgttctttaccatgttctctaccaacggaccgattaactctattctgatgtctctgggatgggttaaaaaaccgatagatttcctgggttctgtaatcggaaccagatctctggtcggatttatgaacttcctgatgtggtttggtaatacaacaattatgctgatggctgctgttatgggtatcagtatggatatttttgaagcatctgaactggatggctgtaacagtatcaagagatttttctatatcacactgccgctgatccgtccgatccttgcttatacactgatcacatctatcatcggtggtcttcagatgttcgatgttcctcagattcttacaaatggacagggaaatccagaccgtacatctatgactctgatcatgttcctgaacagccacttaaagagcaagaactatggtatggcaggtgcactgtccgtatatctgtttattgtcagcggtattttatgtatgatcgtatataagatgacaaatgacacagacccggatggttccaagaaagctgcaaagaaaaaagcaaaagaagaaagaaggaggagataaactatgaaatcaaatacatcaggtcgtgtgcgcagtatttttgttcatcttgtgctgatctttttatccttcctgtgtctgtttttcttttacattctgattgtaaatgcaacacgttcccatgcggatctgcagaaaggattttcagcacttcccggaaaatattttcttgagaatctgaagaatgtggcaaatgacggaagtttcccgatgttccgcggtattcttaacagtgttgttgtatcttcctgcagtgctgcactttgtacatatttttcttctttgacagcttatggtctatatgcttatgattttaaaatgaagaaagcagcttttacctttattatggcaattcttgttatgcctacacaggtaacagcaatgggatttttacgactgatcacaaagatgggaatgtatgactctttacttccgctgatcattccatccattgcatctccggcagtcttttactttatgtacagttaccttcagtcttcccttcctttatcccttgtggaagcggcaagaattgatggctccggagaattcagaacctttaacagtattgtacttccgatcatgaaaccggcagtagcagtacaggcaatctttactttcgtaggatcctggaacaattacttcgttcctgccctgatcattcagtcaaagagcaaaatgacagtgccgatcctgattgcaactctgcgtggtgctgattatatgaactttgatatgggtaaaatttacatgatgatcactgttgcgatcgtgccaatcattattgtatatctgcttttatccaaatacattattgcaggtgtaacacttggtggtgtaaaagaataatgagaattaagaacccccatagagagaatgctatggaggttcttttcatgagaattataatattaaaaacaggagtataattatatgaagaaatggatttacagtggaactagagaagaacagccgtcagagagagaactgatgcatggaaagcttgccaaaaaagcggcgtcagaaggcattgttctgctgaaaaatgaaggaatccttccattaaagaaagatacagctgctgcacttcttgggtatggagcagagaaaaccgtaaagggtggaattggttctggagatgttaacaacagaaagaatatttctatttatcagggactgaaagaagcaggagtaaaaattgtaagcgaagactggatcagcgattatcacaatcgctatgagcaggcgagagaggtgtggaaagaaaaagttctggaagaagctaagaaagtagataatccttttgatgcctatgcagagaatccttttgcaatgccgctgggacgtaaggtggcagaggaagatatctgtgaagcagatgtggtgatttatgtgatcagtcgtatttcaggagaaggaaaagaccgccgcaaagtaaagggagattactatttaagcgagagagaagaggaagatttacgttatcttgcagaaatgaacaaacctgtgatccttattcttaatgcaggtggtcctgtggagctgacagatattctggaacagacagacaatataaaaggaatcttaaatatttctcagcttggtcaggaagggggagatgccctggctgatgtacttctgggaaaagaagtgccgggcggtaaactgacaacaacctgggcaaggcgatacgaggattatccggcttcagaagagtatgggtatctgaatggcaatctggaaaaggaaaaatacaaagaaggtatttatgtaggttacagatattttgacagctttgacaaaaaggtgatgtttccgtttgggtttggtctttcttatactacgtttgagatgaagtgttgcagcataaatatggaagaaagtaagatcagagcagaggttcaggttacaaatacaggaaatgaatatgctggtaaagaagtggtacagatttatgttacgcttccgcagacagaactggaaaaagagtataagagactggcaggttttgcaaaaaccagacttctgaagccgggagaaacacaaacacttactgttgagattccacagaaacaactggcttctttcaatgaggaaacacatacatggatagtggaaaaaggcaaatatggcattctgatcggaaacagttcagacaaactgaaactggaagcagttctggtagtttcagatgatacagtactggaacagatggataaaatctgtccgcttcaggaagaactggaacagatttatctgacaaaagaattgaaagaaaaatctgtgcagagacaggaaaaactgataacagcgcaggttccggaatattattttaaacctgcgatgataccggcaaaatcggaagatgtcggaaaaaatcaggaaaatctgacagaggaagaaaaaagatttgtttctgttctggaagacagagctacagaagagctgattcctctgctttatggaaagatttcagagaatatcagtactcttggtgcagcaggaattcgagtgccgggatcagcaggtgaaacctgcggtactttggaagaggatggaatcccgtctcttgttatggcagacggtccggcaggaatccgcctcagacagtggtatgaggtagataaagagacagacagcatctatgaaatgggagttcttggctcactggaaaatggaattctggaacctggtgtgcatcatgagaatgcagatacttattatcagtactgtactgcttttccggtaggaacagcactggcacagacctgggatacagatcttatgacagagtttggaaaagcaatcgcagaagaaatggaagaatttcatgtaaatctgtggcttgcaccgggtatgaatatccacagaaatccattatgtggaagaaattatgaatattattcagaagatccatatctgtcagggatgctggcagcagcagtgatccggggtgttcagagcaagtcaggatgtggcgtaacaatcaagcattttgcatgcaataatcaggaagataaccgcatgggtgttgactcctgtgtatccgaacgtgcgctcagagaaatctatctccgcggatttgaaattgcagtaaaagaaggaaatcctgtttctattatgacttcctataatcttatcaacggtattcatgcggcgaacagcaaagatctgtgcatgacagttgccagaaaagaatggggatttgacggagcaattatgtcagactggaacacaacagttccggaagatggaagcgttccatggaaatgtgtggcagcaggcaatgacattatcatgcctggaaatccggatgatgataagaatattcgccaggcatataaagaaggtaaacttacagaagaagaaatccgaaattgtgccggacatctggtatctatgatccgtagattagagagtacagattgttgaaatgatttttcaaacacgctctaaatgaaaacagatagaattctggcatatgctgaaaatacagtaatgagaggacaatattaattattaaaatcaatcggaagaccatcagaggccttccgattgatttaatgctcataataactggattttttatttgcatcagcagattttcagcagattttcaaaggagaaaatctctttttcagacattaattcttcaaatctgttcaggttaagatctgagtgttccagttctcttgaaaactgataacagatacggatctggtcatccagcttaaactgccggttgtttttcagataggttcccacatttaattcatggatgaacagggtgcacacaactgccattttcaccttggcgaagatctcatcatcataaactgcaccacagaaataggtatagatccagtaaacaagaagctgttcctcctgaatctgccagtccggataggagaaatcaaattcacttttctgccaggaataaagatttccggagtcagactgcggatctgtatttccattatacagtggagtcagacaattctttaagtattcctgccatcccgggcgcagaacctccatttccggaacaacagttttccacatttttttaaataattgttctggtgtatttgcgcaggcagatgcagcagaactgttttctatgttatctgcatttatacgagagtaaattttgttgcaaaatctatctccgtatccggaatcttcatgtcgttttcgcatttcttcccatttaaagagttcatttttatttacacataactggaaatcatgtgcagcagccagaagtttccacagacgtttctgcatgggtacagctctgtcctggatgatatctataagcatatcacgggtgtccataagtgcagtgaacaggaaataatcaaagtcatcatagacttcttcttttgtctttttttcttttgtgataaagtgtacattttctttttgggaaagtaaaatccttgctgcctccggacaggagagcgacagggaaatctcacgcagaccttcaaattcttcaatatgtctaggataatttctgcaggttctgcagaacatttccggtcctgcttctgtgtagatatcacacaggttctcttcgttgagaaaagcacagcgtctgttatactggcggaaaacatgttgtttccagtcaatatcattgtgcaggcgattgcggaacggacctttaaagtgctggtacttcttcagtgtctgatcgtcaatcacgatctgccatcctgcgcagcaggtatccggacaggctcctgcaatgcaggaaaattctttatagtagtttggaaatgtgtattgcatgatattaaataggatcctttctttttttcttaagtttacggtaagttcctgcagtcatgccacaggatttgcgaaagctctgggagagatagctctgagaggagaatcctgcgagatgtgcaatatctgaaatcccgtaatcagtattttccagaagttccttgcacacttcgatgcgtttccggttcagataattgataggagaaatcccataatattttgtaaattcatgactcagataatacttattaagatgactgagttctgagaggtgatccagagtaatattttccccgtaattggagtcaagataacgcttaatatgagcgcattctttacttggatgctgggcggtgatcagttcaaatggtgaatccgtaatgcgccgaagctgcaggatcagaatatccagcatatgactgcagatggtttcatatccttcagactgtctgtccagctcctgaaacagagaattaaagtaaaataacaaatctgttttcttttcacgacagttaaaaatgcgatactctttatgaccgttaaaggaaaaacatagtccatccacacctacagtaaaataactcagaggaggactccctttggagatttcagtgtgattgatatgtggattaatgatgaccagatcgtcctttgagattgggaaaatctgatcctcgatcagaaaatctccctgaccgtcacgtacatagaacaattctgtaaaggcatgagagtgaggaatactgggccagtcaccctcgtagcgggaagaagaggtatttaaaagtgtaatattctgagctgttgggtgttcggggctgaaacgaaatgattgtgagctcatggcagattctcctttcttctgtttacggcagatgagtatatttgtagcaattttgttggcggattctgaatgatagtattttataacttaaatgaaaaactaaattccagctgtggattatctggtccaaaaccggaatttagtttttcatttaagtatagtattttatatcgcaaaagatataactgagattcttcaggataattagaataagtgcataaaaaatgataaaaataaaatcaacatcagttattaaggtaaaaaatagaaggcttttcagatagctgataacatattttctataataccataatttttttgtaagagcaagatttctaaaaaacaaagcaaaaagtgaattgaaaaaaattttgaaagaaagtattttataaacagatagactgaaaataatgtgattacagaagcgaacggacagtaattatccgcttgtcagcaaaatgaaggaggtaacagaaaatgggaaaaggtcgtgtaaccataccaactgacctggatgtagttccacagacactggaaatgatagaagagtggggcgctgatgctatacgtgactgtgacggaacagaatttccgcagaaattaaaagacacaggtgccaaaatttatgcaacctactatacaacccgtaaagacaatgcgtgggcgaaagcacatccggaagaaatccagcagatgtatattatgacatctttccacacagcggttgcagatacactggagattcatctgatggatcacctctatccggatatgcttgcagtcaacacaagagatgatatccgcagatggtgggaagtaatggatcgtaccacaggagagccggtaccgacagatcagtggtcatatgaagaagagacaggaaatgtagtgatcttatctgcgaaacgcttccatgaatatactgtaagtttcctggcatatattatgtgggatcctgtacatatgtacaatgcagtagtaaatgactggaaagacgtagaaccgcagattacatttgatgtgcgtcagccgaaaacaagagcacattctctggaacgtctgcgcagatttctggatactcatgagtatgtaaatgttgtaagatttactacttttttccatcagtttacgcttgtgtttgatgaacttgcaagagagaaatatgtagactggtttggctattccgcttcagtcagcccatatattctggagcagtttgagaaagaagtgggctatcctttcagaccggaatatatcattgaccagggatacatgaacaatacctatcggattccctcaaaagaattcaaagatttccaggcatttcagagacgcgaagttgcaaagcttgccaaagagatggtagatatcgtacatgaatacggaaaagaggccatgatgttcatgggagatcactggattggcatggaaccgtttatggacgaatttgcatctatcggactggatgctgtagttggaagtgttggaaatggtgcgaccctgcgtttgttcagcgatattaagaatgtaaaatatacagaaggaagatttttgccatactttttcccggatacgttccatgaaggcggcgatcctgtaaaggaggcaaaagtgaactgggtaacagcaagaagagcaatccttcgaagcccgatccagagaatcggatacggcggatatctgaaacttgcactggaattcccggattttgtacagtatatcaaagaagtctgcgaagagttccgcactttatatgataacattcagggaacgactccttattgcgtaaaacgggtagcagtcctgaactgttggggaaagatgcgctcatggggtaaccatatggtacatcacgccatctattacaagcagaattattcttatttcggaattatcgaagcattaagcggcgcaccgtttgatgtatcatttatcagctttgatgatatcaaagcagacaaagatcttctgaagaaatttgacgtagtgatcaatgtgggagatgcggacactgcacagtcaggtggcgagaactggatcgacgaaacaatcatcacagcagtcagagaatttgtatataatggcggtggatttatcggtgtaggagaaccggcagcacatcagtggcagggcagattcattcagttagatgatgtacttggagtagaagaagaacatggatttaacctgaatacagataaatataactgggaagaacatagagatcatttcatccttaaagatgcagaaggcgaggttgatttcggtgaaggtaagaagaacatttatgccttaccggaaacagaaatcttaatccagaaagaccaggaagtgcagatggctgtaaagactttcggtaaaggaagaggcgtttatatcagcggacttccatacagcttcaagaacagccgcgtgctttatcgtgcagtcctttggtcagcatccgcagaggaagaacttcactgctggtattcaaccaactacaatgtagaagtacatgcttacgtaaaaaatggaaaatactgcgtagtcaacaacacttacgaaccacaggatacagtagtttacagaggtgatggaagcagcttccggttacatatggaggcaaatgagatcaaatggtatcagatatgaaagatatcggatagattttatctgtaaaatagattgaaaagaaagtcagtgaagaaataacagaacaggttcagacgtgagcagaatgcttttgcctgaacctgttttgatgtgtcaataagttgatttttgaacaatcttgcgtttgaatttcttatttacgtattgttgtcggtcgctgtagccaccggcatataattatttaattaagctgttatcatcaaagtagttgatctgcattgctgaacgaacatcatgaagtgtctgtgcagcttttgcttcagcaaccttgcttccctctttgaggatatcatatacatcattaagatgctgttcccagtatttacgtctttcacggatcggagaaagctctgcctggagtactttattcaggaatttcttaaccttgacatcacccagaccgccgcgtgtataatgggctttcagttcatccagattctgatattcaggcaggaactctgcaaaatattccggtttgcagaatgcgtccagataaataaatacagggtttccttccacacgtcccggatcttccacacgaagatgattcgggtctgtgaacatggacataaccttcttcttaacatcagcttcttcatctgaaaggtagatgcagtttccgagagatttgctcatttttgcttttccgtcaatacctggcagacgtaagcatgctttattggatggcagaataatctcaggctctgtcagagtttcgccataaacagtattaaatttgtggacgatctccttgcactgctcgagcattggaagctgatcttcgccaaccggaacagtagtagcgcggaatgcagtgatatctgcagcctggctgattggatagcagaagaatccaacagggatgcttgtctcaaaattacgcatctggatttcagatttaactgtaggattacgctgtacacgtgccacagtaacaaggttcatataatagaaagtaagctctgtaagctccggaaccatggactggataaagatagtggatttctcaggatcaatgccgcatgcaagataatccagggcgacctgaaggatgttctggcgaactttttcagggtgttcagcgttatctgttaatgcctgtgcatctgcgatcataatataaatttcatcatataagccggagttctgtaaacgaacacgctcggataatgaaccaacataatgtccaacatgaaggcggcctgttgggcggtcaccggttaaaataattttgctcattttgctctcctaaaagtaaatttcgattttccagagagtttctggaaattctcagttatccctattataaagcctgcgaatgttaccgtcaatgattttgagagaataaataggtattatgttacaccagtatggttttatgtacgctaaataataccatatatctgtatggtattatgatatattggaagagaaaagtggtcagaatcaaaaagcagctaaatttgtgaataattatacaggaaatacatttccataattgataaaaaggaaagattctgctaaaataataaggaattatacaaaattttacactgaataaggataagataaaaggagtaaacacaccatgccagtatttgatttcagcggtgcttcagacaagaaaccaggtgtacagtctgaatgtacctacacgactttccagtccaatgaacaggaaacatcccctgagaaaccgatcatggttcttgataacagcagccaccagtggaaacatcattcctgcggtatttttacaaacccgatcaaacgtacttcctttgagtttaaagaggacgatggaactttcgcagcagatattctcagcattgattcaagattcgtaagccttctgaaatggcttggagagaatcacatcaatgtacgtctttccggacagaatcaggagaaaggatatgcagtttataagattcgtgagaccgcattcggtggcggcacaaagctctccgcagaggacggatttcttcagtttatgatcgagagacttcttgcaagcagtgcaccggcagagatcgcagaagacgaagatgaggaagaaacaggagatgaaatgaagctgacaagtattcagagcatcactgattttatgacctgcgcaggcagaacccttccggacaacatccgtctctgggcaagaagaaaccttgcagttgcccgttcccacgaagtatctccggaggaaagacgccatgctcagcgagctctttccattatgatgaatgtacagtggaagagtaattactttgaagcaattgatcctcaggaagcccgcagaatccttgacgaagaactctacggaatggaatctgtaaagcagcgtatcattgagacgatcattcagatcaaccgtacccatacacttccggcatacggacttcttcttgtaggcccggcaggtacaggtaaatctcagattgcctatgcggttgcccgtatcctgaaacttccgtggacaactctggatatgagttccatcaacgatccggaacagctcacaggaagctccagaatctatgcaaacgcaaagcctggaatcatcatggaagccttctcagcagcaggagaatccaaccttgtattcatcatcaacgagcttgataaagcagcatcaggcaagggcaacggaaacccggcagatgtacttctgacactgcttgacaaccttggatttacagataactacatggaatgtatggtgccgacagtgggcgtttatccgatcgctacagcaaatgataaatcccagatcagcgcacctctgatgtcccgttttgcagtgatcgatattccggattacacctcagaagagaagaagattatcttctccaaatatgtacttccgaaagttctgaaacgtatgagcctcaaagcagaagaatgcgtagtgacagaagacggtctggaggctattgttgagaaacacaaaaacaccagcggaatccgtgacctggaacaggcggcagagcatattgcagccaatgccctgtaccagattgaagtagaccacctgacaggtgtgacattcaatgcagagatggtaagagaattactttcctgaaaaactgaaattatatgtttgaaaaaatcttgacataaataaaagttaagagtatactttcagacatcagcaggataaaatttagaaattgctgataaaaataaaataagatcttcagggcagggtgcaattccctaccggtggtaaagcccacgagccgtaaggtatgattcggtgcaattccgaagccgacagtacagtctggatgaaagaagatagtagtagagatacagaagaattaactgatctgtgaaagcgactgctctggaataataaatttattccagagcttttttatatcatcaaagcagttttaatgatgaagcaaaaagtcagattcacacgaagataattcaaacagatattaatttacaggccctggatgttgaaagacaccggggcttttttggtatcatcagtaccatcagaagaacaggagatgagggattgaaagatataacggatatggaaaaagacaggcaatatatgaaaatggcgttagaactggcacaaaaaggaatgggatttacagcacctaacccaatggtaggtgccgtgatcgtcaaaagaggaaaagtcattggccagggatatcacagaaaatacggtgaacctcatgcagaaagggaagctctggcatcatgtacagaacagccagaaggtgcctccatatatgttactctggaaccttgctgccattacgggaaacagcctccgtgtgtcaatgcaatcctggaatcggggatcagacgtgtgatcattggttcctcggaccctaatcccctggtttcaggaaaaggaatccggattctgaaagagcatgggatcgaagtaacggaaaacgttttaaaagaagagtgcgataaactcaatgaagcatttttctattacatacagaatcaaaaaccatatgtagtcatgaaatatgcgatgaccatggatggaaaaattgccacttatacaggcgcatccagatgggtgacaggcgaagctgccagaatgcatgtgcagaaacagagattgaaatatacagggattatggctggagtgggaactgtgctggcagatgatccgatgcttacatgcagactggaaaacggcagaaatcctgtgcgtattatctgtgactcccacttgcggacaccactgaattccagaattgtgaaaacggcatcaacaattccaacaatctttgcaaccagcagtaaagaccagcagaagataaagaattatgaagatatgggatgtaaagttctggatgtcccggaaaaaaacggacacatagatttaaacagactaatggaacttctgggagctgcaaagatagacagtatcttactggaaggaggaggcactttaaactggtcagcactcgaaagcggtattgttcagaaagtccagacctatatagcacctaaactttttgggggagaaagtgcaaagacaccgatagaaggaaaaggatttcctgatcctgccagcgcaatattattaaaaaacagcgaaataatcagaataggagatgattttcttatagagagtgaggtgaagagtaatgttcacgggaattgttgaagaactgggaactgtgaaaaaaataaaaaaaggagcaaattcagcagtatttacgatacgggcagagaaaattctggatgatctgaaaacaggggacagtgtagctgtaaatggaatctgcctcactgtaactgcatgtctggaagatggttttacagcagatgtgatgcatgagacattgaatcgttctgcgctgattcagctttctttgggacagcatgtaaatctggaaagggcaatgcctgcaaatggaagatttggaggacacattgttgccgggcatgtggatggaacaggaaaaatcacggaaattcgcagagatgataatgctgtctggtacaccattcaggcttcaccacaaattatgaaatatattgtgacaaaaggttctgtaacagttgatggaatcagtcttacagtggcaaaagtctcagaaacagacttttccatttctgcaattcctcatacagtaaagattacagtcctcggagaacgcaaagaaggagatatcgttaatctggagacagacataattggaaaatacgtggaaaaattaataacgcctgtgaaagaacagccgataaaaagtaatattacacgggattttctgaataagtatggcttttgacagaattaaccacaaagcggttattcgattgatgcagaactgtacagtggatgttttatctgcctgacacgaaccagataagcagccaatacgaatgattttgccctcttaacaacagaaaaatatattgtatcagaaaatacattgcataaggagagaaaaaatgaacggatttgattcagtagaagaagctctggaagaacttcggaatggaaaaattattctggtaacggatgatccggacagagagaatgaaggagattttatctgtgcagcagagtttgccacaacagaaaatattaactttatggcaactcacggaaaaggacttatctgtatgccaatgtctgaggaatatgtaagaaaactgcagttcccgcagatggtagcagaaaattcagataatcacgaaactgcttttactgtttccgtagaccatatcagcaccactacaggaatctctgcggcagaacgttctgttactgccatgaaatgtgtggatgagaatgcaaaacccgaagatttcagacgccccggacatatgtttccacttctggcgaagaagaacggtgttctggaaagaaacggacatacagaggcaactgtagacctgtgcagacttgcagggttaaaacagtgcgggctgtgttgtgaaattatgagagaagacggcactatgatgcggacttctgagttacgggaacttgccggaaagtggaatcttaaattcataacaattaaagatattcagaattaccgtaaatgccatgatattctggtggatcgcgtgacgaccacaaaaatgccgaccagatacggagagtttatggcgtatggatttgtaaaccgcctgaatggggaacatcatgtagcactggtaaaaggtgaaatcggagatggagaaaacgttctgtgccgtgtgcattcagagtgcctgacaggagacgtttttggatcacagcgttgtgactgcggacaacagtttgcagcggcgatggcccagattgaggaagaaggcagagggatactcctttatatgagacaggaaggaagaggaatcggactgatcaataaacttcgtgcctatgaacttcaggaacagggaatggatacactcgaagcgaatctggcacttggatttgccggagacgaaagagaatactacattggtgcgcagattctgagaaatcttggggtaaaagagctgaggctgctgacaaataacccggataaagtttatcagttggaagaatttggcatcaggatcaaacagagagttccgatacagatgaatgccacagcgtatgatctgcgttatcttaagacaaaacaattacgaatgggacatattctgaagtattaaatacagcggggattttcatatataacgataacgttcccgaaaataaaatttaccgtatataaaaacctgtacaggttaaaaaatataaatttacagatgaaaggaccagaaaaaatgaaaacattagaaggaaaattagtatcagatggaatgaaagtaggaattgtagcagcccgcttcaatgaatttataacttccaagctggtaagtggtgccatggatgggctgacacgtcacaatgtaaaagaagaggacatccaggtagcgtgggtaccaggtgcttttgaaatcccactgatcgcgtctaaaatggcaaaaagtggaaagtatgatgcggttatctgcgtaggtgctgtgattcgtggaaataccagtcattatgattatgtatgcaatgaggtttccaaagggattgcatcagtatcactggaaacaggagttccggtattattcggagtgcttaccacagaaaacatcgagcaggcaattgaacgcgcaggtacaaaagcaggaaataaaggctatgactgtgcactcagtgccattgaaatggtaaatctgatcaaagaatttgaagcttaaatagacaacagatcagaccctgaaagtgaaaccagttcacgaaaatcgaaaggtaatggtgcttccagaaggagcatttcatctctgaaaggatgctgaaaagaaactttccatgcatgaagggctgccctggaaaaggaagcacaggaagatattttatcgtctgaatgataaagagtatctccaagcaaaggatgtcctgtggatgccatatggacacggatctggtgggtacgtccggtatccagcttaagtgtgataagcgaccagtcctgactggaaaaaagagtatgataatgagtaactgctgttttgatttttcccgataatgcagatgaatgtaaggaaagatcagcagcagttttcattttcagatgattctccgggtcctgcatcagcggtaaatctaaggtatgccagacaccaggcatatctacaggcaaagtaccggatacagcggcaagatattgcttgtgaattttgcatggagattttacagattgaagccttgaagctgctacctgattttgggcaaaaaccacaatcccggaagtctcctgatccagccgccccaccgggcggacacagacctgttcatttttctctcgaaagtaactggcaacaagattggagaggctgtctgtataatgcattcccgtcggatgcgtaaccattcctgccggtttatcaactgccagaatatccgtatcttcatataaaatattcagagaaaaagaagtttcggaaactggagctgaagctttgttggaatggaaatccgacaaatctttacttttgattccgtcattataattttcaagatgcgcagaagcagtcccggcttcctccagacaaacgcggatcacatcgcctggatatattgtctcagttacacgacagcgaactccgtttctggtaatcccgtccggtcgaaacttcgcctggctgatctgccgttttgtaagtcctgcattctttttcagaaatgcttccattttaagttctgtagtttgttcatctattctaaattccagatatcgttccatcttaatacttttcctgtgtaatatattctgatattgataccattgatattacagggcaaaaaataaactgtcaatgcaaaattatgtcagcgtaatgcataaaatatactgaagaaaaattgcaattgtgctatgatataagaatcaaaacaatgaaagcggggcagaaaataaatatgaaatacttaatcattggagccggaggaaccggtggtgttaccggatattatatgaaaaaagcaggcaaggacgtaaccctgatcgcgagaggcgaacacctgaaaaagatccagaaacagggtcttacattggagaaaatgtgggataaaacagaggaaaacataagcattcctgctacagatatggagcattatgcagagcatccggacgtaatttttgtctgcgtaaaaggctattccttacaggaaacgattccgtttatcaaacgcattgccaggaaaaatactatcgtaattccagtgttgaatatatatggaacaggtggaaaaatgcagaaagaactgccggatcttctggtaacggacggctgcatctatgtttctgccaacattaaagaaccgggaaaacttctccagcatggacagatcctgcacattgtattcggcgtaagagacaaagcagaattccgaccggaactgaaagagattcagaaagacctctgtgacagtcatatcgacgggactctttcggaaaacatccgccgtgaagcactggagaaattttcctatgtatccccgatcggggcagcaggactctattaccacgcaactgccgcagatttccagaaagaaggcgaagccagagaactttttaagaccatgataaaagaaatcgcagcacttgcagaagccatgggagttcctttccagaaagatatggcagaagtaaatttaaaaatcctttccaacctcgcaccggaagcaaccacttccatgcagcgggatatcatggcaggaaaacagtccgaaattgacggattagtttacgaagtagtaagaatgggagaagaatatcacgttccggtacccgcatatgagaaagtggcagaaaaactcagagccctgtagcgaagcggattgcgaatatccgcttgaccaccgaaacaacatgaaaaagggatgcgaattactcgcatccctttcgtactcatttggacaataaaattataatttaattataattaactttaattcagcaattataattataactgaggaccagctgcaacaagtgctttaccagcagcgtttccttcgtatttagcaaagttcttgatgaatcttccggcaagatcttttgctttttcttcccattcagaagcgtcagcatatgtgtcacgaggatcaaggatacctgtgtctacgccgttaagctctgttggaacttcgaaatcgaagaatgggatcttcttagtaggagcgttgaggatatctccgttaaggattgcatcgatgataccacgagtatctttgatggagatacgttttccagttccgttccatcctgtgttaacgaggtaagcttttgctccgctcttttccattttcttaacaagttcttctgcgtattttgtcggatgcagttcaaggaatgcctgtccgaagcaagcagagaatgtaggtgtaggctctgtgattccacgctctgtaccagcaagtttagctgtgaatccagacaggaaatagtactgagtctgagcttctgtcaggatagatactggaggaagtactccgaaagcgtctgcggacaggaagattacgttcttagctgccggtgcagaagagatcgggcgaacgatgttttcaatgtggttgatcggataagatacacgagtattctctgttacgctcttatctgcgaaatcaatcttgccttcagcatcaagtgttacattctcaagaagagcgttacgtttgatcgcattgtagatgtccggctcagattctttgtcaaggttgataactttagcgtagcatccgccttcgaagttgaatacgccgttgtcatcccagccatgctcgtcatcaccgatcaggagacgtttcgggtctgtggaaagagttgttttacctgttccggaaagaccgaagaagatagctgtgttttcgccgttcatatctgtgtttgcagagcagtgcatggaagccatgcctttcagtggaaggaagtagttcatcatagagaacatacctttcttcatttctccgccgtaccatgtgtttacgataacctgctctttagttgtgatgttgaacattacagctgtttcagagttaaggcctaattctttatagttttcaactttagctttggaagcgttgtatacaacgaaatctggctcgaagttttcaagttcttcagctgttggctggatgaacatatttgttacgaaatgtgcctgccaagcaacttcaacgatgaaacggatagccatacgagtatctttgttagcaccgcagaatgcatctactacgaaaagtctcttgttggagagctcttttttagcgatttcttttactgcattccatgcttcctgagttgcaggatggttatcgtttttgtattcgtctgttgtccaccatactgtatctttggagttctcatccataacgatatatttatctttaggagaacgtcctgtgtagatacctgtcataacgttaactgcaccaagttcgctgacctgacctttttcaaagccttccagttccggtttggtttcttcttcaaataatacttcataagaagggttgtagacaatttctgtagttccggtaatgccatacttgcttaaatcgatttttgccatcttacgtttaacctcttttcttcgttaatgaaagcgcctgtttaaacaggcttaagataccttaccataaaagcgaatgggtatcgcttctcttttactattatacatatttaacgcttaaaatcaacaggatttttgcctttttttgaaatttgttaaagatttatcaactcaaatttgatgaaaaaaccgtcatttttcacaaaaggtatgtaaatttattatagtggcaatatgggaatactattcgtggatatgataatattctgtctgactggaataggcaggaaagacaaccaggaaatactaaccaggagagctgccactatgtggttgtgccgaagaaagatgcatgttaaaataggaaagaattatccggctgaaaatgacagagtattatacagcagagaaaaataaaggttactgtgaacggagtgaacattaacaaataaagagaggatgaagattatcaaaacttattatttaattgattatgaaaatgtaggaagtgaaggcttcaaaggatgcgaaaaattacgggaaacagatattatccatcttttttatacagacaacagcagaaaaatagaccttgatattatcaatgatcacggagagtcaaaactgatcacgcataaagtaccgacaggaaatcagtcagcagatatgcatctgggctcttatctgggatatctgataggaaaagagtgcacaggtcaggatgaagaatgtaaaattgttgtaatcagtaaggatacaggatttgaccatattatagaattctggaaagcagaagaaaatgtgaaaatttccagaaacgagaagatttccggaaaacaggtacagacaagaaaacaggtaaaaaaacagaccagtaaagaaaaagacagacagttggcagaacaaactgatcagaaaacagaaaaacagttgaatgaacaatctgaaaagcagtctgtcaaacaatcagagaatcagaatacaaaaaagccaaaacaaaagataattgacatgaaagccggaacaaagaaattacagcaggaattagtattggttctcgacaaggcaggcatgccaaaggaagtagtaaactatgtttctacaactgtggagaaaaatgcagaagacaaaaacagaaagcagcagatttacagatctatcatttccaaatacggacagacaaaaggactgaacatctataaccatattaaaaagaaaatctaacggaataaaaaataacggaataaaagaaggaggccgggaaccttattgattcccggcaaaagtatgaaaaagaaaaagttttatttgcaattactctttgctctgtacaggtaataatataaccggaaaatgtgagaaatatgtggtgagaatttgaaaaaaatgtgaaatggatggaaatttaaaatgaacaggcaggaaaagagaaaatatagcaggaacaataattcttaaaaaaatgggagaaagcattagactatgaatatacaaatattcggaacaaagaaaaactttgacagcaagaaagcagaacgctatttcaaagaacggggaattaaatatcagtttatagatatgaaagaaaaaggcttaagtaaaggagaattccaatctgtctgccaggcaattggcggttatgataaactgatagatactgactgcaaggataaagacctgctggcattgatcacttatatcgcagaggaagacaaggcagagaaaattctcgaaaaccagagcatcatcaaagtccctgtggtaagaaacggaaaacaggcgacagtaggatatcagccggagatctggaagagctggaagtgatagttatagccttttacaagctttcagattttacaatattatatcgaagaaaatagctgtttgacatatttatatgtgttataatataaaattattatagaagttactttatattatattgtcgtgcgacagatataatgaactgatttataaaaatggaaatattgaggtgatggaaatgccattaacaaagattgcagcagagaattttacagtatttgaagatataaagattcctttttgtgaaggattaaatgtattagttggtgaaaatggtgtgggaaagactcatattatgaaattagcctatgcagcatgtcaggcttctaaacatgatgtgtctttttcgcagaaaacaacaatgttatttcgtcctgatcagtctggaattggacgtctggtaaacagaggaaagagtggaagcaataaagccatggtttctgtggaatctgatactgccaaaataggaatgacattttcaaccaagacacgaaaatgggatgcagagattaattcagaagagaaatgggaaaagcagatgtctgatctcacaagcgtatttattccggcaaaagagattttatcaaatgcctggaatctggatgctgcagtaaaaatgggaaatgtggaatttgatgatacgtatctggatattattgcggctgccaaaattgatatttccagaggagtggattcaactgtaaggaaaaaatatctggatattttacagaaaatcagtaatgggaaagtaacattgcatgaggatcgtttttatttaaaacctggtacacaggcaaagttagaatttaatttggtagcagaaggattacgtaaaattgctcttttatggcagttgataaaaaacgggacactggagaagggatccgttttgttttgggacgagccagaagcaaatatcaatccgaaatatattccggtgctggctgaattgttgatcatgctggagacagaaggtgtacagatttttgtttctacacatgactattttttatctaaatatattgaagtaaagcggagacaggacagtaaactgcagtacatttccttatataaaaatgaaaacaacaaagtattatgtgagatagcaccggaatttgaattgttggaacataatgcaattatggatacattccgtcagttgtatcgagaagaaatcggggtggcattaaagtgagcgttataccagaatcaggaatgaattttggaaaatatgatgaaaaagatttatttcatattgagacatctgaaatttataaaaaacttggagatggaatcccaacagtggagtttatcctgaaatataatggaaataatatagtgtttctggaagcaaagaaaagttgtccaaatgtggcgaatagatatgaatcgaaggaaaaagaactgaaattcgaagaatattatggttcaataactgagaagtttatatcatctttgcagatatatctggcggcaattatgaacagatatcaggatacgtcagagataggagacaatcttcgatcggtaagcaatatgaaagatgtaaaattaaaatttattctggttgtaaaaaacgcagaagatattacgtggctagccgggccattggcagaattaagagccagattgcttaaggtcagaaaaatatggggtgttgaggtggttgttttaaatgaagaacttgctggagaatataatctaacgtgttagagtgtttttctggttgcatgaaataagaactatatgctaggagatgataaaatggcaaagatcagaatcataaagaaaaataatgactgcagcatggaatacgaagtaggtgatatttgtgaggtcacaggtacctggtatggcggcgtccacatcaatggccgttccggaatcccggtttcccttgataaagaagaatatatggaactcaacacagaaccggaagaacctgacagtgcggaaaatgaaaacactttggaaacaccggaacacgatattcatgcaggcgacattgtacagcatttcaaaagagaatgggtatccccggatacttccgaatatctctataaagtccttgcagtagcccatcacacagaaaacggtgaaaaactgatgatctaccaggctctctacgcacctttcaaaatctgcgccagaccctatgatatgtttatgagtgaagtggacagagacaaatatccggatattaaacagaagtacagatttgaaaaatatactgaaaaatagatgattgatattttatggaattgctatagtaaaacaggcacttttgcctgtacaaaaacactttgtcgttgtatagtaataacaaataataacagcatacgtttccagagattttatagcattatctgaaaaaatgtgcagaaagaacgaaagggaaggaaatatgcagaaggtattagtagttgtagacatgcagaatgacttcatcgacggagctcttggaacaaaagaggcagttgccattgtacctggtgtaaaagagaaaatcgaaaattttgatggagttgttctttttaccagagacacccatgagacttactatcttgacacccaggaaggacagaagcttcctgtaccgcactgtatccgtgacactgaaggctggcagatcagaagcgaattagatgcactcagaaaaacagaacccattgataaagaaacctttggttccacagatcttgcaggagaactggtggcaatgaatgaggataatgaaatcaaaagtatcacatttgtaggtttatgcacagacatctgtgttatttccaatgcacttctggcaaaagcatctctcccggaagttccgatcatcgtagacgctaaatgttgcgcaggcgtaacaccggaaagccatgagaatgcactgaaagcaatggaagcatgtcagatccagattgacagataaactgcggagcagttattcagttatgagcaagtagcaaagcagatattttatccgcttgacaattcagatatgaggagtgacaaaataatgaaaacaattacacgagatgaggcattcgcattattaaagaaatacaacaaggatcccttccatattcagcatgccctgactgtagaagcagtaatgaaatggtatgccagtgaacttggctatggcgaagatgcagaatactggggaattgtaggactcctccatgacattgactttgagttatatccggaagaacactgcctgaaagctccggaaatgctccgcaaagcaggcgtaggcgaagacgtaatccattcagttgtatcccacggctacggcatcacagtaggatgtggcgcaaccattgatgtagcaccggaacacgaaatggaaaaagtactctttgcggcggacgaacttacaggacttatctgggcagcagcacttatgagaccatccaaaagcacaaaagacatggaactcaaatccctcaagaagaaatataaaagcaaaggcttcgcagcaggatgctccagagaagtcatcgagcgaggagccgaacaactcggctgggaactgcagaagctgctcactatgacactgcaggcaatggcagactgcgaggatgagattaagtcggagatggatgcggaagagtaatggaatgtctgatttattgacttattaccagaaatgaatgatggaatcagagaaccagactgtatgtaggggaagaaacctatgtgcagtctggctttcttttttacttatatggaagttgatgaaagagaaaagatatcaaaaaagaaatatgcaacagtttttgcgtattatagataagtgaatataacaaaaaatgtctgacgaaaattgttgctgtttatgtcaaaaaaatgtataatatgtcacaaagaagttagatttatcagaaaaattaaggcataagaaacaaaacaggtattttgcagataaaacaggagtgaaatcagtgctggatggcatttggtgagtgaatatatggcagatatagataaaacattaaaatattacaacgaaaatgcgcagtcttttgcctctgggactgtttcggtaaagtttacaaaagtgcaagataaatttctggagaaacttaacccagatgcgtatattcttgactttggctgcggtgcaggtagagatacaaagtactttctgagtcgtggatatcaggtagatgcagttgatggttcagaacaattgtgtcggattgcaagtgaatatacggaaattaaagtcaggcagatgttgtttcaggaattggatgaaaaagaaaaatatgatggcatatgggcttgtgcatctattctccatttgccgaaaaaacaactgcgtgaagttttgaaaaatatgtatgcagcattgaaatcgaaaggatggatttatacctcttttaaatacggagaatttgaaggtgaacgaaacggaagatattttaccgattttacgacatatacatttaaagatttcatacatgacatgcatggccttaaaatagaagaacattggatcacaggagatgtccgaccgggaagaggtgaggaaaaatggctgaatttacttctgcagaaaaagtaaacatcgggtatgaaaacgaatattccacagatgcaatgaccggcggaccggataaaagaagacagctatattatcagctgatacagagcatgaaaaaagcagaaagcgttgatatcattgtctcttttcttatggaatccggagtgagaatgttgctgaaagaactggaacatactttaaaacgtggagccaaaatccgaatcctgacaggaaactaccttggaattacacagccatcagcactatatctgatcaaaagaaaacttggtgacagagttgatcttagattttattgtgaaaaaggacggtcttttcatcccaagtcttacattttccattatacagattacagtgaactttacatcggctcttccaatatttccaggagtgcgctgacctcaggaatagaatggaattatcggttcagcagtcagaaggacccggaaaactacaaagagttctttcgtacatttgaagatttatttgtgaatcattccattatcattgatgataaagaattaaaacgttactcccagaactggcatcgtccggcggtggcaaaagaccttgacagatatgactttacggagtcggaaacaaatgatacgaaaataaaacctttatatgaaccaagaggagcacagatcgaggcattgtgcgcattggaagatacaagagcagaaggagcacagaaagcactcattcaggctgcaacgggcatcgggaaaacatttctggctgcttttgattcaaaaaaatatgagaaagtgttgtttgttgcacatagggaagagattctgaaacaggcagcagtttcttttcagaatgtaaggaattccaaagactatggattttttatgggagctgagaagtgcacagataaaccgcttatatttgcctcggtagcaagccttggaaaaccggaatatttaaatgaaaaatatttcgctccagattacttcaattacgtggtgattgatgaatttcatcatgcagtcaatgaccaatatcgaagaattgtagaatatttcagaccgcagtttctccttggactgacggcaacgcctgagagaatggacggcaaaaatatatatgaaatctgcgattataatgtgccgtatgagatttcactgaaagatggaatcaataagggaatgctggttccgtttcattactatggaatttatgatgagactgactacacaaagctacatatagttaagggaaaatatgcagaagaagaactgaacagaacttatatcgggaatgcttacaggcatgagttgatttacaaatattactgcaaatatggctctagtcaggcattaggattctgctgttccagaaaacatgcagaagaaatggcaaaagaattcggtaaaagaggaattccgtcggcagcagtttatagtaatgcagatggagagttttccatggacagagcagaagcgattgagaaactgaaaaatggagaaatcaaagttatcttttcagtggatatgttcaacgaaggtgtagatattccatcagtcgatatggtaatgttcctgcgtccgacagaatctccggttgtctttctgcagcagcttggaaggggattgcgcagaagtaagggaaaagaatatctcaatgttctggactttatcggcaattatgaaaaagcgggaagagtcaggtatttgctgatagggaaaaataaaacaggaaaagaaacatattatccggcagataaggcagattatccagatgaatgcttcgttgattttgatatgagattgattgatctgtttgcagaaatggacaagaaacaactgacaatcaaagaacaaatcagaaacgagtatttccggatcaaagaattgcttggcaaacaaccaaccagaatggatttgtttacttatatggatgatgatgtgtatcagatggcggtcacacattcgaatgagaatccgtttaaaaagtatttgaattatctggaagaattggatgaactcacagatgagcagaaaaaattcagccagggaatgggaaaagattttataaatctgctggaaaacaccaacatgagcaaggtgtataaaatgccggtactgatggctttttataaccatgggaatgtgagaatggaagtgtcagaggtggaacttctggcaagctggaaaaaattcttctctacaggaacaaactggaaggatttggagaaagagattacatatgaggaatatcgcaagatttcggataagaaccatatccaaaagataatgaaaatgccggtacgctttctgttaaaatctggggaagaattctttgtgaaaaaggatggcgcggcgttggcattgagggatgaaatggaagaaattgtgaaggagccggtgctggcggaacaaatgaaggatgttattgagtatagggcgatggactattatcggagacggtataaagagcagataaaagcacttttatagtgatggagaagatgcgtatggaatcagaaaattatgtgtataaaaaagaaatagactggtctacattgatggaaggctttacattgccgttagataatcaggtgatttttctccgaaatatggagaattttttacagcgtggacaatctaaaatcattcatttttttatgaatggaaaaacgtatgatgcgaaaatcgttaatatgaataactcagtagaaaagagaaagaaggatgcctatcagatcagatatccaagaaatggtgagctgtcacaggcacttcagcaatactttttcaaaagcatgagttacataaagatgattcgtgaaaacagagatccaaaagacagaagttatataaaaatgccagatggactaaaggaatatcttgctatttataccacagaatatgaagatacttttcttctggagccaatagcacaggatgattttcaggttatgaaaaaggcaattcaaggaatgcgagagcggactgtggagaatgaaatagaatatgagatggaagataaaagcagtggaatagaaaagaagttacagattgttaagattcgtaaactgaacagaaaaattggagaaaatttgaagctgttgtacggataccgatgccagatatgcgggcaggtgattggagaaaaatatggttcacatatcgcagaggcacatcacattgattattttgttaatagtttgaataatgatgcgaataaccagatgattgtatgcccgaatcatcatagtgttatacatgatgcgaatccggtgtttgatcggaggaggatggtgtataggtttgataatggggtggaagaaaggattagcttaaataagcatttatttatatatgtgaaatagtacatacaaatatagaaaaattgttgcggtctaatatggagattgttataatggaagacagagcgtagaaaaacgtggatggatattcacatatagaacatgaagaggtaacattaatccgtatgggaaaaagaggtgatatacaaaattgataaaggtggaaaatgtatttacagtgacgatattgatatgttgtgagaacttgatataaacatgactaatgattctgaattataaatatttgtattatcagaatctggattacttggaatggaaaagaattagagtgaaatagataattccaacaaaggttttataaacaaaagataaaatgaaggagagttatgatggaaataattgcacaggcagtcagagtgattgattatgaaaacaacagtgttcaaagaagaaatgtgaatatgatgccaaagtttaaagattatattgaacaattgattgttcatgtgagcaacaatgtttccatcagggaatatcatacacagtcaacaagaaccgaagttattgcgggaattcttgagattgcaggaaatctggaaactccagatgcgattgaagaaaagatagattcaattgcagaaagacttgtcagaaatgaacgggaagctcaggctcggattgggcatatgaacatcagtgtacagaagggaagtttgatttttgcattgtttgaggataatggaaacagaaagtgtattcttgctaaaattgagcatacaggtttctttgatgaaagggactacagtgaaagatttggattctcaaaagatacaaagaaaatctggaaaacatgcatgtttgatttgaataatctgaatgcagatcagtttcaggcaaaaatatattcgaatacggttgcaaaatattggtggttcgatttcctagagttggtggaatgtcagaatgacagggtaaatacgtacaaaacatatgattctgttgaaaagtgtttaaacagaaaattgaagaaaacagcgccttatgataatagagttatccaaaatgccatgtacgcatatatgaacaatgcaaatcgggagatgttcgattatgataatatgattgaaaaaatatttacgggttatatgcctaatgatatgacaggcgagcaaaaacgagaattacatgaaagactaaatagacttccagaagaaaaaggatttgacagacaatttcaggcaataccagacgccataaagaaaaaagcaataagaacttataaaataaatacaggaattatgttaaaaatctcagatataggaaatgaaaatgatatcagtgcatatgaagatgcgtatggaaaaaaatatcttaaaataaggttaagcgatgaccgcacttttcagacatttgcacgcaataatgaagacaatagagaggagtagtttcttatgttggaaagaatccgaaatcaaattacagagctgagaaaggaagaagaacggagatatacatatgaggcagagttcagtttcagcaaagaacttccggtacaatattcagaatggatgaatacgatttgggatatttctaatagagacaaaataaaaatttatctagtttcagaggggggagaatcctttgatttaaaagaaaatgtagaggaagagtatgcagaatttcttaaaggtcttgaaagtgatgaaacagttgaggttagccttacaatagacaaaaaaatagtaaatggatatttatctgtatactgctttgaaaaatttgctgaagatattagttcattaccaatagacaaagttttaacagcattttcgaattttatgaaaaaagctggtcggagtataacctttgaattatttgacagtagagatatgttttatacaaaaacaatgttctttctgacggcaggaagcagaccactggatttggactttgatagaacaaacagattactggaatgcagagaaaatgcatatttttataatcaggacaattatgaattacttccagatgattttaaaatagaaattggatacgaaggaaacccgctcaaagacttattcctgaaaatggaaacaattttgtctgcttgtttactggcttcaaactcattcatacaggatggtaaactgaaacttcagataatggggcagcgttcaatggaatatcatgatactcttgaaaatatacagggaaataataatctttataaaatctacaattggatttattcaggcggcagtattgttgataaagtgattatagctaggaatattatatgtctccattgtaaatatgaatctttgttaaatatcagtgatggagtaatggcatccattcaaacgaattacaatctttatttgagagataatgtaactcaatatttggaattaaaaaataaagttgcagaatttattacggatattgtatcgagaactggagaatatgcaacggagatgttagataagttcaagacaaatcttttggctattttgggattcctgttttctgtaatacttgcgaacatcgtatctgatcagcctttggacaatatttttacaaaagacatcacaattctttcagaaattgttttgatagcctcttttggttatctttttattagctatcaacagtcaaaatatgaactacaaaaagtatatagtagttatgacaagctaaaagattcttaccgagaaatactaacagaagatgatataagagagtgttttcagaatgatgacataaaaacagaaatgaaacgaacgattgatagatctgtgcgaatatatctcataatttggggtggtattttgctttcgcttctgatattggtagaatatatgagtagtgaaccttttatatggcctattttaaaatctttattccaaataacaaaaaaatagtgtgatcataccggtatatacccaaaagaaactaagtaggagtatactgagggtctgaccgtgcgttcagcaaagggtatatagtccggtgggtggtcccatcaaataagctgttaaccacagcatttgaagcgagtcttgagtctgttacggtaacgtgaaggctaagcgtagacagcaagatagcagggatagctatggagcaccgaaatcccaaagtatcagagggtcgacaccgtggtcagggtggaagacaatatatgcacttatcgttatggtgagattttgcatgcctctgcggtgttgttgaaactattcatgtcagacagggactatatgtcaactggagaggacctgcattttcttttcagagtgtgtaaatgaaaagtatgtccgccaaccaaaagaagaaagacaaacgaagtgcaggtagtcggaggcccgaacagtaccggtgaaggtatgaacaaaataaatactggagggaagtcgagagagaactgtgcctcgcagttctggcctgcgaaactatatcaaagaggaaacattagctatacacagagataggggaactaatggaaacgaaattggcgagaatatcacaattatcaaaagaaaacccagacatggtctttacatcactggggcattttatcaataaggagatcgcttgaattgttggaagaattctttcataaatatattaatattagaagttgtcagttattaaggattaatcctgaaacgaagaagtggaattgctctatggcaacaagggcgaatcgcagggaaactaggtatttgccgatttgctgcctcatctgctcaggataatagaaaatgccggaatgctgatcattgatgaatttggcaatagtcttcataataaattggctgaaaaaattattgaattctttatggagaatgttgctttacgctaaaatggtttcatgctatcattattttagttaaaaattttgatggcatgaagctatttttgattggaggcatggaagatttgaactttaattattgctataaaattatttatgaatcaggggaaacttatgacagacgaagaaatgagctgtcagtagaaatttcaaaagaagactataagaaaattataacaggagtattacaggaaagatcgattgatcagattgaataactgcgcgtcgcattctcgttacttccagtgatgagttagacgcgcaaatttttttgcaaaacaacagaacaaatgtttacataaaccgatacatatggtataatatttatatggaaaaagatatatttaatatagataaaaacaaactttcatatggtaggggatatgtctattccttgcagtatcatcttgtctggtgtacaaaatacagaaaaaaggttttaaaaaacggaatcgatacagaatgcgaagaaatgttacagaatcttgcagaagaatataaatttcagatcctggcaatggaggtgatgccggatcatatccatctgcttgtggactgtaaacctcagttttatatttcagatatgatcaagatcatgaaaggaaatcttgcacgccagatgtttcttgcgcatccggagttaaaaaaggaactgtggggtgggcatctgtggaatccgtcttactgtgccataacggtcagtgacaggagcagagaccaggtgcttgcctacatcgaaggacaaaaggaaaaagaaaagaaaaaagcctgacagaagaaatgatttgttggaggaaaagagatgcagaccgtatccagctatggcgtagaattacgaaaacagaatatcccagtccgccagacactggaaatctaccggtctgtggtcagttacctgacagaaatatatgagcaggtgtgggaagaactggcagagataccggatgccaaaaggcggtttaatgctgcagagcatctggtgcatactacaaaaaagaatcctgcacgctttgattttgatcttcgctttccgaagatgccgtcctacctgaggcgagccgcaatccagcatgcattgggaagtgtatcttcttacgaaatacggatggaactgtgggaaaagtcaggagaaaaagcagggaaacccagactggcgtatgagaatcatgccatgcctgttttttatcgtgatgtcatgtacagagaggaaaaagaaggaaaagacgaagcatatctgaaactgtatgatggtcatgactggaaatggttttgtgtgcgtttaaatcacacagatatggaatatctgcgcaagaactggtcggggaaaaaggcatcagccccgacactggagaaaaggcaccataaatatttcctgcgtttttcttatacggaagaagtgacacttacgaaaacaccggtaaaagaacagatcatctgtagtgtggacttgggaatcaataccgatgcggtctgtaccattatgcgggcagacggaactgtcctggggagaaaatttatcaatcatcccagtgaaaaagaccggatgtaccgcacactgggccggatccgaagattccagagggaacacggctctgcgcagtcacggggaagatgggcatatacgaaacgcctgaacatagagctgggaagaaaaattgcaggtgcgatcgtaaaaaatgcagaaaagaaccatgcagatgtgatcgtattcgagtatctggaaatgcagggaaagatatccggaaagaaaaaacagaaactgcatctgtggagaaaacgggatatccagaaacgctgtgagcatcaggcacacagaaaaggaatgcgggtatccagagtctgcgcatggaatacgagcaggcttgcatacgatggctccggaagtgtgtcccgtgacccgaaaaatcacagtctttgtgtattccagacaggaaaaagatataactgtgacctgtcggcatcgtataatatcggagcaagatattttatcagagaacttttaaaatcccttccggtaacggaaaggtctttgctggaggcaaaagtccctccggtaaagcgtagaacctcatgtgtttatgcagatctgaaagaacttcatttacaaatggaaatcttaaaggcagcataaatgcaggcagatatacagtggactacctgcaatgtgggaacctgccatatctggcatggaaaaatgcgcataactgcgctgacctaagttacaggcgtatccgccgatatttagtctgacgcctaaagcgtctggaagcacgcgacttcagtcgtgtgaggataaagtttttaattcacgggatttcggatgtaattgataaaatgacggaaaatgttgaatttgcggatcgttttatgaataaaaatggttcattaagaaaaacaccattaaagaaaaaaagagctatttcaaaacttgaattttttattccagaatatgagtatcggcgattaaaaaagatgaaggatccaatagagacattggaacgcccagtggaacatatgactgtttatcggaatgatggttccagtgtgactttgacagcggagaatggacgtgtgagtattgttgactccagggagaagaatgtaaggcatattattgaggcagattattttgtttcgaaaattttgtaataatttattataaataccattgatggtgtccgtatgtatgccaacggatatttaaagatatttgatgtggatagtaaactattagacgaaagaaaaaaatgaaaggacataaaaaaatatatgattagtttttataagagtattgttgaccaggacagggcttcgattgttatatgcaaccttaagcatgagattatctacatgaatccggcagctgttaacagctatgcgaagcgaggcggtgataaacttattggaagaagcctgttagattgtcataatcaggaatccagggataaaatacagaaggtagtggactggtttgcggcagatgagagccataaccttgtctatactttccataatgagaagcaaaataaagatgtttatatggtggcactcagagaagagggaagactgataggatattatgaaaaacatgaatatcgaaacgcagaaactatgaaacaatatgatttgtggtgatgttatggcacaggacgaatggtgcaggcagttattcaagaatgaggaaatacgacagaaactcacccgtgtggtaagaagaaaaaatggaatgaggtaagtaacaatatggaatcaaaacagaaaagaacagctcttgtcactggcggaagttccggaatcggacgatgtactgtagcagcattgagtaaggctggctatatagtctatgagttcagtcgccgggatgttccggtagaaggcgtgaagcatatgtgcgtagatgtgacagatgaggcttccgtgcaggaagccgttgggcagatccttttggaaagaggaagtatcgagattcttgtaaactgcgcaggttttggtatttccggggcggtggaatttacagagttaaaacaggcgaaagcacaatttgatgtaaattttttcggaactgtcaatgtaagcagagctgttcttccttctatgcgcagacagcacagagggcatattgtcaatatcagttctgtggcagcggtggcacacattccgtttcaggcgttttattcagccagtaaagcagcagtgtcttcttattcctgcgcgcttgataatgaagtaagtccttatggtgtcagggtaacagcagtagaacttggagatattcataccggttttacccaggccagacaaaagatagttttgggtgatgatgaatacggtggccgtatttcacacggtgtcagtcagatggagaaagatgaactaagtgggatgtcgccggagattattggtacatatattgcgcgaattgcacagaaaaagaactgcgcaccaatttgtgtggcgggtgtgaagtataagattctgagattcttatgtaaaattctgccgtgtacattacggggaaagattgttggttctatttacgcaaaataattgagattattttatagaattccgatatagcccgggtgtctggatatataacagtttttttcagctttacgttaaaatagtttcatgctatcattattttattaaaaattttgataacgtgaagctgttttttgattgtggggtgtaaggaatgggtagatttgtaaatcctgataacagtgcatttcaggtggcactgaattctccgatatatgtggataaaaccggattgttggaatatacaaacagcgtacttaatacaacagaagcttatatctgtaactgcagaccacgcaggtttggaaaatcatatgctgcaaatatgctggccgcttattatagtaaaggctgtaattccgaagaaatgttttcagggctggatataagcagggaatccgattttaagacgcatcttaataagtatgatgtgattcatcttgatattcagtggtttctggcaaattgtgataatgtggataatgttgtagcgtttattacgaaatccgtacaggctgaattgagagagatttaccctggtgttctgcctgaagaagagataagtttgtcggaaagtctttcgcgtattaaaaatattgttggacagaaatttattataattattgatgagtgggatgttctgatcagagatgaagcggcaaataaaaaagtacaggaaaagtacattaattttttgcgggcgatgttcaagggaacggaaccgacaaaatatattcagttggtgtatcttacaggtattttgccgataaagaaagaaaaaacgcagtctgcattaaataattttgatgagtttacaatgcttgatgcaggagtgatggcgccatatattggatttacagaagctgaagtgaaggatctttgcgaaagatatcacagagattttgagaaagtaaaatattggtatgatggttatttgctggaggactatcaggtatataatcctaaagcagtagtaagtgtttgtgtgcggggcaggtttagaagttactggtctgagactgcttcttatgaagcaattgttccttttatcaatatgaattatgatggtttgaaaaacgctataattgaaatactttccggtgcttcgattaaagtgaatacagctgctttcaaaaatgatacggtgaatatacaaagcaaagatgatgtacttacgtatttgatccatcttggttatttgggatataaccagaatagaagaactgcatttgttccaaatgaagaaatccggcaggaattgacaatggcggttgaaagcagaaaatggaatgagatgattacttttcagcaggaatcagaacatttactggaggctacgctggacatggatgaagaagcagttgaagagggaattgagaaaatccatacagagtatgtttcgaatattcagtataataatgagaattctttgagcagtgtacttgcaattgcatatctgagttcaatggaatattattttaaaccagttcgtgaactgccgacaggacgtgggtttgcagactttgtatttattccaaaaccagaatacgtttccagttatccggcgcttgtcgtagaacttaaatggaataagaatgtcaagacagcattacagcagattaaggaaaaacaatatccggattcagttctggattataccggagatattttgctggttgagataaactatgacaagaagacaaaagaacatcagtgtctgattgaaaagtatgagaaattataaaagtattgataaaacggaaaccattttctattgagaggtgacagataatatggaactaaaggagaaaactccacatacgatattaaatgaaataattgaagcggcaaaagaatgcggacaggttatgcttcaggcggacagggcgaattttggcattaaggataaggcaggaaaagcaaattttgttacgaagtatgattgcaaaattcaggaaatgctagaaaaaaagttgtctgagattcttccggaagcggagttttggggggaagaagaggattgccagattaacagaaatgcagaatatatttttgtggtggatccgattgatggaactaccaattttattaaagattatcatatgagctgtgtatctattggattgattcgaaatggaaagagatatatgggagtcgtgcataatccgtatcttaatgaaactttctatgcgatttccggtgagggtgcatatatgaatggaaatgcgattcatgtatcgaaggatgatctggcaaacagcattgttttgtttggttcatcaccgtataatacggagcttgcgaaggcatcctttgaattagcttacgaatattttcaaaaatgccttgatatccgacgaagcggatctgcagcacttgatttatgtgccatagcatcaggaagagcggaaatttatttcgagcttattttatctccatgggattttgcggcaggtgcacttattgttgaagaagcaggcggaattgtgacgactgttgaaggagaagaacttccatgcttggaaaagagttcgattcttgcaagaaataagtagtagttctgaaatctggaggtgcacggtgaaaaagttaacaacagggaaaatatggcagtttgcagccggacagtttggatgggcgatgttgtccgggattatttctaactggcttgtatatttttatcagccggataagacagccatcagtcagggacagacagtgttcattccacaggggctggtggtctttggcatatttactattattggcggaattacagctttcggaaggatttttgatgcttttacagatccaatgatcgcctctttatctgacagatgtacgtcaaagaatgggcgaagaattccgttcctgaaatgggcatctttaccgctggcgctttctacagtactggttttctggtcaccggttaataaaaacagctggatcaatggagtgtttttgctgattatgattctggcgtactatctttccattactgcgtactgtacaccatataatgcgctgattccggaacttggacatacccagcaggaaagacttaatatttccacagtcatttcctttacatttattgccggaactgcagtggcgtatctggcacctacgatatgggggatgtttattcctgcttttggcagagttggtgctatccgtatgacctttactttgatggcggctatagcgtttatctgtatgcttgtgccggtattttgtatccgtgaaaaagactatgtagatacggttcctgcaaaagagtcagcttttggatctcttgcagctacttttaagaatggagaatttcgcaagtttgtggcatctgatattttctactggattgcacttaccatgtttcagacaggtcttccattttttgtcaccagtcttttgaaacttccggaaacaatgacaactttgtattttgtgggaatgacagcgttgtctcttgtattttatattccggtaaataagcttactcctaaacttggaaagaaaaagatgatcttgtttgcatttgcagtatttagccttgcttatttttataccggatttatgggaaaaatgagttttattccggcatcggtgcagggactgatcctgacagtcgtggcggctcttcctatggcgattttcggaattcttccgcaggctgttgtggcagatatttcgcagagcgactcgattacatcaggaagcaatcgtgaaggaatgttttatgcggcgagaacatttgcgtttaaacttgggcagagtatttctatgttgatatttacagcagtctcgacgataggggcagcagagggaactggttatagagttgctgcttttggggcagcagtattctgttgtataggcggaattatactggtattttataatgagaaaaagattaatgggattattaacaggcaccagtgaagattataatacaggtatgtatcgaatggtgaaaagcagatagcaacagaattatgaaaaagcaacaggagtacatataatggaaataatacatgagaatgaatatttgtataaaatgaatgatgaaatagaaccatatcttgcaacgcaccgtcaggaggggtacatttctggtgcagaggatcatctgcatcgaaaagacacggggatagtggggaaaattcatgtacagcgctacctggcagagaagccgaaaggcgtgattataatcagtcatggctttacagaagcagcgccgaaatatgaagagatgatttattattttctgaaggctggatatcatgtgtatatgccggaacatatgggacatggacaaagttattgcctgacagcagatccatctcttgtacatatagatacctggaagcgatatgtgagagattttttgaaaatatgccatgtaattaaaaaaacatatcctgaactgccgttagttctttttgcacattctatgggtggggcgattggcacaattgcagctgcatgggagccgcaactgtttcagaagattatattgaattctcctatgctccgcccgctcaccggaaatgttccctggccattggtgattgctattgcacagacgaagtgccttttgggaagggaggaagactatgtggctggtcagaagccttatgatggtagtgagactttcgaaaccagtggatgtacttccagaccaagattcgaaaaatataatgagatgcgtaaagagaataaaaaattccaggttagtgcagcttcttatgggtggcttctggcgtctgtaaaaatgagttggtacataaaatattgtggatggaagaaactgacagcacctgttttgctatttcaggcagaaagagatgattttgtatctgtaaacgcattgagaaaatttgcagagaaaattaatcatagaggaattacttcctgcgaatatgtttacctgccgggaaccagacatgagacctaccgcagcgatgacaggacgatggaaatgtatttagataagattatgaagtttatggattcaggcatggtatctgacagttgtacgtgattcgtatcttaatgaaattttctatgcgattcatgtatcggaggataatcaaataatggaaatggttttctgttatcagcatctctactaagagaactgataacaggaaaccatttttattatttggctgagtttttatttaacagccggaaacagattacaaaaaagataattccatatacagttgtgataggtgtcgccattccaacataagtcagagatgtttccggtaatctcgacataatgatagataccggaattcggatgcagaatgcggaagtgattccctggatcataacaggaatactttttccacagccattaaaatatccgatactgctgaaaagtacacaagtcagtatacagtcggcagagaaacctttcaggtaagcggcgctctgcgcgattacctcggaatcattggtaaagaaagaggataatactccgcctccgaagaatcctaccataaagatgatgattccaacggaacatccggtaataattgcagtgtaaaaacccttccatgcccggcttttctttccggcaccgatattctgcgcaacaaatgctgatacactctgcatgatagaggacggaaccagcataataaaggaaacgattttctgtgcaattccatatccggcagatggcatcagacccatctgattgataacagaatttacgacaagaaatgaaatctgaaccgttgtctcctgaagtgcgatcggtatacctacgtttaatatttttccaagctcttctttataaatccgacattgttctctggaaaattctataggcatatcctgctttcttaatacaacgacagaacagacgacagagacaaactgtgcaaatacagtggcaatggcggcacccgcaacatccatgtgaaatactccaaccagaagcaaatctcccagaatatttatgacacaggcaattcctacgaatagaagtggaaggtttgcatttcccacacctcgcagcacaccgctgattacattgtatgcaatgataataacgataccggcagaacagattctgatataaagaattgttttgtcaaaggattcagccggtgcctgtaaaagatgcgcaattcctccggcggcaaattccagtacaaatgtcatgatgacagcaatgatcagaaaaagaatgatcgtagttccgaccgcatttcctgcttcttttggtttttgttctccgatgtgatgcccgattattacggtggagcccattgcaagacttgtaatgataaaagtagccatctgcataaaggaacttcctgttcctactgcggaaatactcgaggcatttccgaattttccaacaatcagcaaatcaactgcgccatacgcagcctgcaggatcaatgctccaagcacgggaatggcaaaccgaagcaaagattggaaaacaggtccttctgtaaaacttatttcttttttcgacattttttcctcctgagaatgtggattgaatgcttcagatagtaacgagtgtaccaacaaattgtgacgcacattttacagaaagcatttttcaaacacactctattgattgcttgttatctaaagcatttagatattatcagtataacatagttattgcgcacattctactgtcacgttgataaccttgtaagtcttggagttactgtgttactgtttactcagtgccttgtaacaatcgttactgttcactccgttcacagtaacgtagccaaaattcattccagattgcctgcggcaatggaattttggcttgtatgtctcgggatagtgatgtgtgaacagtaactaacaatctttttccatatcaaataagctccatattctgattgcgaatatcagttgaagtatgttactatgagaaaaaacatagctatatcatatgatttttgatgaagtaaatcagatggctggtgacacagaaacatgataagaaaggcaaaaaacatggcatcagaaagaacagaagaactatacagggttttgctcagcaagggctatccgaaggagctttgtgctgagattgcatataaaaatatgaatacagattatactgcaaccagaatgctgggttatttatatcggtatacaaatcctaaaatcgaagatctggtagatgagatgctggcgattttaagtgatcgggcgcagataatagagaaaaaggaatctgaacatgcgcaggcagtgatcagtgaaatgtaccggaagggattataagtgacgaagaacttggagataagataacaatggagcaatattattacaaccatatgaataaggcgcagcaggctgcatatcacagcattcttagcggtgtgaaaaacctggcggatgaatttcagattccggcattagagggagaagaactttataatgtattttttcagatgcgtctggatcatccggagatattttgggtgagcagttataaataccggtattataaagactctccgaatctgatttttattccagagtatctttttgataaaaagaagatttgcgaacatcaaaaggctatgactgccagagttgagaagctgattcgcccggctcagaagctgtctgaatgggagaaagagaagtatgtgcatgattttatctgtgaaaatatccgctatgataaactgaaaaaatcatattcccatgaaattatcggaccgttggggcaaggcgttggtgtttgtgagggaatcgcaaaagcagtaaaggttttgttagatgcactgggagtctggtgtgtgattgcaatctgtggaaataatcctgagaaggggattaagtatcgccacacatggaatatcgtaaaaataggaggtacatattatcatctggatgcgacctttgataataccctggggaaagatcgtgagacttctgaaatccgctatgattatttcaatctggatgattcacagattttcagggatcatgagcctcttattgcgccggcgcctcactgcggtgatcatgagcacttttactataaggagaagaagctttcttttactaagaaagaggatgtgtataaacgttctttgcaggcggcgaagaaaggcagggtacttatttttcactggagaggcggctatctgacaaaggaagtactgaaggaattgctggaacttatccggaaagcaggagatgagaaagacaaaacagcaatggtcagcataaactggccgcaggcagttattcgtgttcagtatacggatatgcaggtacaggagagtgtgacaatagaggaagcgaatgagggggaaaaggagtaagatagttggcttttttgtgataaaataaagaaaaaacgggaaggtatcaaaaattatgaaaaaggattcaagaatgacagagggaagtatctctggaaagattatctttttttgccattccactgtttctcggaaatctgtttcagcagttgtataatacagcagattccctgatcgtaggcaattttcttggaagtaatgcgttggctgctcacagaaaacccgagacataccgcgcgaatttatgcggctagcataaattaagtttgcgaagcaaacgatactccttgggctttgcacaaggaggttcatatttcctgcatcgcgaagcgtgttgctgagaatggagtaaacagtaactttttgcccgatgatttacaaaatatcttgacagaggtattgattttgttatagtattagattcaataaaggggagtaacctacgtttgaaaatctgcgtttgcagtgtcgtcagtacggtggagacatccggcgctgcaaggaaatggtgagacttttattgcattttttgttatgcaataagggtttcttttttatatcattttattaaaaatccttcattgcataaaaaattacagttggtgaatatttgcaaaaaaggaggcaaaggtaatgaaggaaatctatcaacaaacagtagaagaagttctggatcacgtggaaagcagggaatcagggcttaccagtgaacaggttgaaagatccagagagaactgtggatggaatgagcttgcagaaggaaagaaaaaaagtattttacagattttctttgaacagtataaggattttctggtgctgatattaattgcatcggcagtgatatccggtatgcttggagatgtggaaagcgcagcggttatcgtgatcgttattacgattaatgcgattttgggaaccgtacagacagtaaaggctgagcagtctttgcagagtttaaagaagctttccggaccggaagcaaaagtattgcgtgatggtgtggctgtccagctccctgcaagagaactggttgtgggggatgtgattctgcttgaagcaggtgatatgattccggcagatggaagactgattgaaaatgcaagtcttaaggtggatgaaagtgctcttaccggtgaaagtcttgcggttgaaaagagcatggacactattttggcagaagcaccacttggcgatcggacaaatatgctgttttccggaagctttgttacatatgggcgtggcaaagcagttgtaacagatgtaggtatgcagacagaggttggaaagattgcgggacttctgaaatcgacttctgaaaaacaaacgccacttcaggcaaatctggatgattttgggaaaaagctttcgattctgatactgatattttgcggaattctgtttgcaatcaatgtatttcgtggtgagaagatcagcagtgcatttatgtttgcagtagcgcttgcagttgcagcaatcccggaagcgttaagctctattgtgacaatcgttctttcttttggaacacagaagatggcaaaggagcacgcaatcattcgtaagcttcaggctgtggaaggccttgggagtgtatctgttatctgttcggataagacaggaacgctcacacagaacaaaatgacagtagaagattattatattgatggaaaaaggatttcagcagctgcaattgatgcagcagatccggcacagagatgtcttttggattacagtattttatgtaatgattcaacaaatgaaaatggagtggagatcggagatccgacggaaacggcattgatcaatctgggcagcagatgcggaatagaggctgccgatgtaagaaatctttatccaagagaaggagagcttccttttgatagtgaccgtaagatgatgtcaacacttcacagaatcgatggcgagaacaggatgattgtaaaaggtgctgttgacaggcttctggaactgacagagaggatttggacaaaggatggagtccgggaaattacagaagcagataaagaaaagatccagatgcagaatcaggatttttcgatggaagggttacgggtactggcgtttacttatcgtgaaattccggagaatcatatattgacgatggaagatgagaaacatctggtatttcttggcctgattgctatgatggatccgcccagggaagaatcaaaggctgcagttgcagaatgtataaaagcgggaatcagaccggtcatgataacgggagatcataagatcacagcagcggcaattgcaaagagaattggaatcttacatgatctgtcggaggcatgcgagggtgctgatattgaaaatatgagtgatgagcagctgagggaatttgttccgaatatttctgtgtatgcaagagtgtcacctgagcacaagatccgtatcgtccgtgcatggcaggagaaagggatgatcgtggcaatgaccggagacggtgtgaatgatgctccggcattgaagcaggcagacattggtgtcgcaatgggagtgactggaaccgaggttgcaaaggatgccgcagcaatggtacttacagatgataattttgcaacaattgtaaaagcagtggaaaatgggcgaaatttatatcagaatatcaagtatgcgatccagtttcttttgtcaggaaactttggcgcgattctggcagttctttgtgcatcgcttgcaggacttccggttccctttgcaccggtgcatctgctgtttatcaatcttttgacagacagccttccggcaatcgcactgggtgtggagcctcatagcagtgaggtgatgaatgagaaaccaagatctgcagacgagtcaatactgacaaaagattttcttggtaagatcgggctggaaggttttgtgatcggtgtgatgacaatgattggatttttgacaggatattaccagaatggtgcattgctgggaagtacctacgctttcggaacactttgcctggcacgtttgtttcatggatttaactgcaaatcggatcatccggttatctttacaaaacgtttctttaataataaatggcttcagggagcatttgcacttgggtcagtacttattacagcagtactgacggttcctggacttcattttctgtttaaagtggagacgttgaacctgatgcagcttggatgcgtatatctgtatgcgtttgccagccttccgattattcagatgcttaaatggatacgcatgaaattaagaaaaagaggggaaagatagtgagtctttcctcaggtatgcatcggaagcttttggctttttatggtaagggcgaaaatgtaattttactgaagttttggaaacagcagctatatacaaggctgctgtttttgagtataatagtagaaataagcagtgcaaattgaggaaggatcattcaaatgatagttaacaagtgttcggaaaatttacttaaaaaatcaaaaaaattatatgagaattacagggacaactgtacagttgtccagagaatgctggaaaaatataaaaagatatatcccaatatttctgattattctattatgcattttatagatattgcagaattttgcgatttaataatggacagaaagaaactggaaggcttgaatgaagatgagtgttactgtcttttgctggcagccctgtttgcgcataccggatttggtttaaatcaggaaatcatgaacagatatataaacagactgggaattcaaaagcagactcaatcgcttacattcctgcagatcatgagcaaatatcatgttttgttcagtgcgtgtctgatagaagaatatggagatatatttgaatttccgtcagagaaacataaatatgccataaccagtatgctgtattttattggcggaaacagcgatgatataaatcagctggaagaaattttggtattagacaataaaaatactgtcagattgaaggatctggcagcagttcttgtggttggaaatcagcttgcagaattgaaaaatataaatcctgatctggattatgaggattttgataaatataattctgaagagattgttggatttgttgaaagaaatgtcgtaagaagcatttctgttaaagatggtaaacttgtgatagaagcaggtggatcggattcagcatatgcactgattgaaagaaaagtcaatataattatcaataattttaataagattctcagaagtcttactcatgagtcgggtgacaataccagtcttttttgcattgattcgatagagctcaagtgtgttctgtctgctgaaaattcagagaagatctatcttaataaagaaattgaagaatcatggacagaagaggatattgaattttttcataaactttcttttgaagaaagagtattttatgcggattatctgtctacagagtttgagatcaccaaatttcttatggactttgcaaaaataaataaagcagtacttgcgggattagagtatagagtaaaatcaccgaagtccttatataataagctttatcagagagtagagaagtctttttttgattcaatagcggatgttattcgttatacagtgatactggaaccgaaagaatatgttgaacagatacgatctgtgacagatgctctgtatgagaaaaactggaagatatattcattgaaaaattattgggtcaatgacagctttccgtataatggcgtaaatgcaaagtttaaaaactcacgcaactatcgtattgaaatccagttccatactcaggaaagctttgatgtgaaaatgagtgaggaagatcataaactgtatgaacaaagaagagttttagaaccgggctgtgatgaatataacagaatattacagttacagctgaaattatattcagatatggaatatcctgaaaatattgcagatttagaaaaaatttaactgaatcaagtaagtcctctgcttcaattgcaaatatccgtctgaccctacagcatcaaatgttacagcaggaggtaccggataattccgggtcatttgatgcatgacgattaaaacctgacaacagcagattgttgttctccatattagtatatgttctgcatagaagcctgtgaatggttgtaagagagaagatttatgaaaatagtgaaaaataaacaatccaacagataaactcttgaagatgatgtggtattgtgtggcattatgtgaatttttgtgagatttcagtagaaaatagcttgtgattataatgaaaacaaggtatactagtataaaagacagcagtcgggagaaccattttcccgtctcgtaaggaggataaaatggcaaaaaactatgatggcatggcagttggggcatttgaactggataacctggtagcttgctttgtcgctctcgatgcagcatccaaggctgcaaacgtaacgattcaaagcgtcgaacgaaaccgactgaaaagcggagcatgtgtaaaaatacgcggcagtgtttctgatgtgaatgcagcaatggaagtggccttagagacagccaaaccccttggcaagattgtttctcacacagtgatcgcatcaccttccgcagatactgaagtggcacttaagatgaccattaacaaatagaacatgtcaggaggaaatgagaagatgtcatatggagcattaggattagtagaggttgtgggaagctgtaatgcagtagttgtccttgaccagatgctgaaaacatcagatgtggaattccgtacctggcataccaagtgcggaggtcacgcaactatattcttaagtggcgatatagcagcagtaaaggcagcagtagatgctgtaaagggaaacccgccctgtgaaattatagcagcagctgtaatctcagcaccgtctgaagaaacatcaagactggtgaaagaagaggaagaaaaacaccataaataatagctaagaggactttctgtaaatcagtaaatgaaatgcagaaagtctttttggaatatgtataaagattctgcagtaaagaagtgtcagggtattgaaaatgatgtgaaggtagtattaaatcaagaaggcaggtatttcggaagatggattataagagtgtaaaaatatcagaagatgcaaaaattgcaaggcagtcagtggttattggagatgtaactatcgggcgtgacagttgtgttcttcattatgctgtgatacgtggcgatgatgctccgatcgtgattggtgaggaatctaatgttcaggaaaactgtacgattcatgtaagccgtaatatgccggtacatattgggaataatgtgacagttggacataatgcagtgcttcatggatgtatgatcggtgaccgtacattgatcggaatgggagcggttgttcttgatggtgccagaataggtaaggattgtatcataggagcaggaagtcttgtgacaaagaatacagtgataccggacggttctctggtgatgggaagtcctgcaaagattaaacgaaaccttacatgggaagaaaagctgggaaatcttgaaaacagtaaagagtatgtttctgtgtctgccgaaatgcagaagcagggtgtattgtaaaaatcagacaataaaaatatcccaggaactttatgtaaaaacagtggagttccggggatatttatgtatatcagacagtaatcttaaaccagtctttttcttcaaaatctactactgtgcagtcatttgcataagtgcattccggaagaatgatcatggcatggagtacttcattgtttaaaggaagaggacataaatgccagatagcagtattgatcttcaccatagttccttttggaactatgaatgctctggtaagttccggaacaggtgcgcctgcagaagccggtgctacatgtatgatcatgtcatcatccagtgcaacaattccttcccaggtagttgtgtgatattcagcagctttaacgatgcgttcatctttatgtactgcaataggtgaaaaaccaatggatcccatacaggtaccggaaatacggtctggataaaatttatgtatttcaccatgtaatggatagccttctggctctgtcatgctgaaaaatgtaccaaatggtgcaaaatctgcagcattgatttttgttgcttttagttctctcatggtataatacccccttatatagtattttatgaaaagttttgattattttttgtgtgtgactggtggaagatcacagtgataagcgatacccagtggggttaccagcagaggatgtaccggacgataaacaggtagcccaagctttttttcaaatacgcctgtgaaatcttcaaaacttgcggaaccgcctacaacatatacagcgggtacctggtagcctgtgagaaatttctgagtgatcgtggccattttttctaccgttgctttgattacagggaaaatttcagcttcttttgaacgatctgtttttaaaatttcagcttcttcgtatgggatgttatagtgccctgctacagtcatggtcatgtgactgccgccggtagcttcatcgtctgtgtagattactttgccgtttttgagaatactgattcctgtagtgcctccacctacatccactacagcgccgtctgaaatcttaagtacagcagctgcagcggtgggttcgtctacgatattggaaacctcaaaacctgcaccctccagcacatattgaatactttttgaacttccttcggaaactccgggtgggattgcagctgcagcgtaaggaagttcagttttcagtttttcttcaagttcagccttcagccgtgtaacaagctgaacagattcataataattgacgatcacgccgtctctgatagcctgggagggagcggatatgccagcaatcggacggttggtagtgtctacaactgccagaactgtattagctgtacccaaatccacacctaccttcaggcggcctttgaattttttgcattcaccggtttgaacaagatcggcgaaatttgataaagttctgtttttcaattccatatctgtatactcctgatattttattttatagatgagatcgtttgacattgttactgctcattccgttctcagcaacatgtttttcgatttttgctgtttcagaaaaaacaacaaaaaattgcaaacagatattatatattatagaataatcagtatggaaaagcaacaaaatatgccgtcaggttatgaaaagaatagaaaaattattggtaaatatcaaagttttcattaaatattttttcattgtgtgataaaatatttaatgaacttaaatacttcttgaattcttaaataaagaaaggatgctatgcaggaatccgcatagtggcagtgttggcatattggtcaaaaacagtggaaatcctgatagcacctgtaattgcggtggtcaaatctacatctgtggcgtcttttatcattttgtgcctgatatggataccgtccagaaatctgtcagtttttatttcttttcttatggttctgcctgtgatatatacgaatatccttgagggaatacggcagactgacagtaagatactggaaatggcaaaagtatttcaggtgaatcccggaagaaagatcagatatatttatgtatcgcaggtactaccttattttctctctgcatgcaggctttcacttgggatgtgctggaaagcaggagtggcagcagaggttatcggagtaccctcaggttctattggtgagaaactgtataatgcaaaaatatatctgaatactcctgatctttttgcatggacgattgtgattattgtgataagttttgtatttgaaaagtgttttcttggaattgtaagcagagtagtttatatgatagaacataaataacggagattttgatttatggtaattttcttaaatgcgttatttgtgaggtttgttacaggtggagaaaagatatggatataaaggtagatcatgtcagtaaagcatacggagagcagcagatactgagagatttgtgttgcgtttttccagaagggaaaaccacttgtataagaggaagatccggatgtggaaaaactacactgatacggcttcttctggggctggatattccggataagggaaaaatagaagggataagtgacaggaagatcagtgcagtatttcaggaagatcgcctgtgcgaaaatctgagtgctgcttccaatataagactggtatgcacagaaacaattgattatattttaaaaaagaccgagggaaagacattgatctttgttacccatgaagaacaggaagcagtttggctaaaggcagacaaaacattaaaatttatgaagaatcatctgataaaataatccggaaagtgatgggataaaataatgcagacttatacatatgtttcaaagggaaaatttgaattaatggaaaaaccaaaaccagtacttatgcatgaacgagatgcagttgtaaaggtaacgcttgcaagtatctgctcaagtgatctgcacattaaacacggaagtgttccccgtgcagttcctggtataactgtgggacatgagatggtaggtattgttgaatcagttggaagtgctgtaactcatgtaaaaccgggggatcgtgtgactgtaaatgtagaaaccttttgtggtgaatgttttttctgtaaaaaaggttatgtaaataactgtacagatgagaatggcggatgggctcttggctgtcgtatagatggtggtcaggcagaatatgtaagagttccgtttgctgaccagggactgaacaaaattccggaaggagttactgacagacaggctttgctggtaggagatgttcttgccactggctattgggctgcacgtatttctgagatcacagaggaggatactgtgctgatcattggagctggtcctacagggatttgcactttgctaagtgttatgctgaagaatccaaagtgtattattatgtgtgaaaaagatgaaaacagaattcattttattaatgaacattatccggaggttcttactgtctcgccggaggaatgctttgattttgtccaggaccatagtgatcacggtggagctgatgtagttcttgaggttgcgggagcggaatctacatttcgtctggcatgggaatgtgcaagaccaaatgcaactgtgacagtggttgcactttatgataaggctcaggtactgccacttccggatatgtatggaaaaaatctcacattcaaaacaggtggagtggatggatgtgattgtgaggaaaccctgaaactgatcgcagaaggtaagattaatacagaaccacttatcacacatacctatccgcttagcagaatcgaagaagcatatgaactttttgaaaataagagagatggtgtgatcaaagtagcggtagagtgttagagcgtgtttcgaaaacgatgtactagcaggattgctgtagatgaaatgagcaggtctgtgaaaaaaatatctggagcagtttcttttttgaaaaaaaggaattaagtaatgaggagatgacgaagtcttgaataaagcatatgaacaggaaatagaaatgtggaatcaggtttttaaagaatgtacacctgtagatttaagaaagttagatttgaaagtggaaaccatgtttgatgaagctttaaaactatttgcggaaaaaacaacaaatgtcctggattttggatgcggaaccggagatatttctacacataaggttctggggattgatgcctcaaaagtgggtattcaatttgcaaatgaaacagcaaaactcagtgagtataaaactgccacgttcttagaaggcggagaacatatgataagtttccggcagttcgcttttttcctgtgtttctgctatacttttgtcaggaaagagaggacggcttatgaacattgatttaagagaagaacttagaaaacgtgatgaacttcttgacggttatctcaagcagattgagatccaggaagagtttatccagaagcagaaagaaatgatcgaatttctggaagaccatatttcaaagatcacagatattatcagcggcgtctgacagataaaactatgccgggggaaaaagtatgcctgatgcttatgaccgtattacactcctgtgccgcctgaaagctgcacagaccagaaataaagaactggaatccggagaaagatatgtccggctgaaagagcttcatcagaaggaatgcagggaatatggatccaggatcctggaactgcagaaagaagcggcggatgcccataaggaaacgatacgtgtccgtaattactggttccaggtactggaagatatgcttctggagtttgaaaaaatgcagaagaaaacgaaacaggagctccaggagatggaaaagcgcgccctgaaagcagaaaaacagagggatgatgcactggataaggtaaaagaactccagcaccagttttatgaaacagcagtcaggctggaagaagaacagggaaaaaatctgaaactccgtgcacagataaaccgtgattatgaaaattcttctatcccttcttccaaaacactccggaagaaaaagatcacgaacagcagggaaaagaccggaaggaaacccggaggccagccaggccataagggacactgccgcaaaaaacaggagccgacccggccggcaatccttctcccgcctccggaaatagtcctggaagacaattcttttaaaaagacatcaaaaacgatcataaaacaacgggtaggcatccgcatgctcctggatgtaacagaatatcatgcaaatgtttattatagcagtcagacgggagaacgcgtttatgctccatttccggccggaatcattgatgatgtgaattatgacggcagcatccgggcatttctgtttcttcttaacaatgactgctgtacatcgatcgataagagcagacagtttctgtcaggcctgaccggtggaaaactgaatatctcaaaaggaatggtgagcagactcagcagggagtttgccttaaaaacggaagctgagcgcagggctgcttatgcagatatgctgctttcccctgtcatgcatacagactgtacaaatggcagggaaaacggaaagggctgccagatatatgtctgcgcaacgccggacggaaaagccctgtattttgcccgtgagaaaaaagggcatgaagggttaaaggacacggtcactgaagattaccaggggatccttgtacacgatcatgaccggaccttttataattatggaacggatcatcaggaatgccttgcccatgtgctgcgctatctgaaaggtagcatggataatgagccggaccgtacctggaataaagatatgcattcactggtacaggaaatgatccatttccggaatggattacagctgtctgaggaactggatccctgtaaggtctctgaattcgaagaaagataccgtaagatactggagaccgcccggaaggaatatgaaaatgttccggcaaacgattactatagagacgggtataatttatttctgagaatagagaaatatatgtagaaccatctgctgttcctgcatgatctccgggtacctgccactaataatgaagcagaaaggcttctaaggaattataagcggaaacaggcgcaggccgtgacattcagaagtttcgagagcatcgattacctctgccaatgcatgagcatgcttgttttgatgcgcttagaagaaccagaaaatatatttgacagagtgtccaggatatttggataaagaaaaccgatggctttaactgttttccagtttacaccatcggttttcttaagtccagttagcccttgaaccaatggtatttagataatctatacccttagttagtcttaagggtctaacaaaaagattacaaaagccttgacttttaagctggaatctgcggccgctctcattactgatattattgtgaggtaatgagagcggcctttgaattagaaattaaaatttttctaattcaggaggcacatacctatgttccatttaaaacttaaagatactcttaagcattctatagcaacggttacatcgcatatggattcctttgtttataatccgggacgcgattattctcgtatacgaaaactttctccagatcatgttatttcgttccttatttctcaaggcgcttcatccacgaaatgcgaatttctggatttctttcaaatgtcagaggatctcccttctatatctgccctaaatcaaaggcgttcccaaatgatgccagaggctctggaagctgtattccatgagtttacttcttcttccgaaaagcttgaactttcaaagcaggaacagcagtatcaatacattgctgctgatggttctactacttcttttttcagcttttcaaagtattcgtctgatgattattttatctcagaaggacattctgcctccggcttttacagcatacacattaatgccttttatgacataaataaacggatctataccgatgccattcttcagtctgcacacaaaaaagatgagttccttgctttttgccagcttgtagacagacatatccctcacccggatcaaagaactatttttatcggggacagagggtattgctcttataacaacatggctcacgtgatcgaaaaagaacagtattttgtttttcgtacaaaagacattacaagcaaagggttgattgggaactttgtttttccggattctgatacatttgatataactgttgacgtaactcttacgagatcccatcgtaaatctataaaaatcaaagatggtttttaccgaagatatgttgaccaggcagcttcttttgactacataaaatatggctcagaagatacttatgatctgacttttcggatcgtacggtttccaatatcagaagatacttatgaatgccttgtgacaaatcttccggaaaaaaactttcctgttgaaaagcttaaagaaatctataattccagatgggggatcgaatcctcttttcgaaaattgaaatatacgattggattaagtcattatcacagctataaacctgattttataaaacaggaaatatgggcgaagtttatcgcttataatgccacggaacttcttgttgctcatactgtagtcgttcatgggaaacgtaaatattcctataaagtaaactttacgcttgctgcacatatatgcagaatctatctccgtctccacacggagacagattccataaatgtgatggcactgttacaaaaggaattagtcccgatccgctgcgatcgacaattcccaagacttaaaacggctcatttcagaaaacccaaatatctgatataccgtgtttcctaaacagtatcatcaactgatagtatatcactttttcaagcagatgaaaatctgcttatttgtcgttgacaaaacgaacaagaatttaaccattttcatatttcataaatttttcaaggcatttctttttaaatgtcaagtaatctccggaatatgctttatttatctaaataccattggcccttgaacagtaacacaatctttttttccatatcaaataagctccatgttctgattgcgaatatcagttgaagcatgttactataagaaaaaacatagccatatcatatgatttttgacgaggtaaatcagatggctggtgacacagaaacatgataagaaaggtaaaaaacatggcatcagaaagaacagaagaactatacagggttttgctcagcaagggctatccgaaggagctttgtgctgagattgcatataaaaatatgaatacagattataccgcaaccagaatgctggggtatttatatcggtatacaaatcctaaaatcgaagatctggtagatgagatgctggcgattttaagtgaccgggcgcagataatagagaaaaaggaatctgaacatgcgcaggcagtgatcagtgaaatgtaccggaagggattataagtgacgaagaacttggagataagataacaatggagcaatattattacaaccatatgaataaggcgaagcaggctgcatatcacagcattcttagcggtgtgaaaaacctggcggatgaatttcaaattccggcattagagggaaaagaactttataatgttttttttcagatgcgtctggatcatccggagatattttgggtgagcagttataaataccggtattataaagactctccgaatctgatttttattccggagtatctttttgataaaaagaagatttgcgaacatcaaaaggctatgactgccagagttgagaagctgattcgcccggctcagaagctgtctgaatgggagaaagagaagtatgtgcatgattttatctgtgaaaatatccgctatgataaactgaaaaaatcatattcccatgaaattatcggaccgttggggcaaggcgttggtgtttgtgagggaatcgcaaaagcagtaaaggttttgttagatgcactgggagtctggtgtgtgattgcaatctgtggaaataatcctgagaaggggattaagtatcgccacacatggaatatcgtaaaaataggaggtacatattatcatctggatgcgacctttgataataccctggggaaagatcgtgagacttctgaaatccgctatgattatttcaatctggatgattcacagattttcagggatcatgagcctcttattgcgccggcgcctcactgcggtgatcatgagcacttttactataaggagaagaagctttcttttactaagaaagaggatgtgtataaacgttctttgcaggcggcgaagaaaggcagggtacttatttttcactggagaggcggttatctgacaaagggagtactgaaggaattgctggagcttatccggaaagcaggagatgagaaagacaaaacagcaatggtcagcataaactggccgcaggcagttattcgtgttcagtatacggatatgcaggtacaggagagtgtgacaatagaggaagcgaatgaaggggaaaaatagatgtaataaacagcttaactttttccgtgtgaggatagggctttttaaaagaatgtgatcagagtgagaaaatagccgagatgtgggacagggaattaaaagaaatcagggagcaggaacagtataggaaagctatattatgtatggaagaggaacagtatgataaggcaataattttgtttgagggacttccaagagattatgaagatgccagaaataatttcagggaataagggtgaaataaatgaatcaaaattgcatgattacacgagaagcagcgttggaattcggtttatcatttcagaatacatatacggaaagacctttccgtgatcagaactggcaagtggtaagagcgagggaaaacaaaaaaatttttttatggatctatgaacgaaacggttatgttaatctgaatgtaaaagcagatccggagtggcgtgatttttggcgaagtgcctatgaatctgtacaggctggttatcatcagaataaggaacattggaataccattattctaaatgggacggtaccggataaagatattaaaagaatgatatccgaaagctatgatctcgtaacatacagcccgacaaagaagatttatgaggcagtgaagcaaattccgaaaggatgcgttgcaacttatggtcaggttgccgaaatggcagggaatccgagaatgtcgagagcggtagggaatgccctccataagaatccggatccggagcatattccctgttatcgggtagtgaatttcagaggagaactgtcaggggcttttgccttcggcggtaaagatgtacagaaaaagctactggaagcagatggaattgaggttgtcaatggaacggtggatttaaaaaaatatggattgacgcaaagagatgagaaactgtgagaaaacagatacggaagattaccttattaacatttgggggcgggcaaatctttccggatctgcctggcagtggaagaaattgtaggaaacattgtagaacatggatttacaggtaaaaaaggaaaacattttattgatcttcggctggcattggaaaaagatggaagcgggtgcctgtcactgcgtgacaatggggtgaaatttaatcccctggaatacagaaacagggatacacaatatggacttgctattatcagggggatttcagagaaaatagattaccattatgtggcatccatgaattgtctgaatgtgatgatcaggtgaaggatcatatatgaggaatatgaaatgaattacaggaatgtaaaaatatcacaagatgcgaggattgcgaaatggaaaagatattagttgggtgtaattctactggaatatggtattcaaatccagttccatactcaggaaagctttgatgtgaaaatgaatgagaaatatcctgaaaatattgtggctttagaaaaaatccatagtaatcccataaaataatgcaattaaaacaattcagtagtgatatcatactcctgctttacgataaacagatttcatgttatgattatttcagctgaatttgagatattctattaatgaaaagggcaactattcaacagcttctgactgtgaaagtattgaacagttacgaagaaaaataaaaggaggatcaatgttatgcttacaacatggactccggcacatatgccggaaaaagaggaaatcaaaacccgtctgcagacagcaagaagtcagctctatgattttcagatgaaaatcaaggaacataagatcccggtaatcgtactctttgaaggctggggatcttccggcaagggaagtacgatcggaaaagtcattaagaatattgatccgcgtttctttaaggttgccactatgtcagctcccacagcagaagaactgagatatccatttctgtatcgctattttaaacagattccggaagccggaaaatttacatttctggattccggctggatggagcagacttgtaaagactgtctgtcgggcgagattgaaggcgaaggttatacacagcggattgacagcatccgccgttttgagcggcagcttacagataatggttatctggtgctgaaattctttatgcagattgacagggatgaacagaagcggcgtgaaaaattacttctggatcataaagacaccagatggcgtgtgtcagactttgataaatggcagaatgaacattacaaaaaatgtgcaaaaatattttctcagtatctgtctgacacgaatgcttcctctgcaccatggtacatcatagatgccagtgacagaaaatgggcggaacttcaggtgctggagactatggtaagcaatattgaagttgccatgcagaatcaggcacattccgttccgattttgcagaatgtattccctctggagcagattccccgtctgtcggatattgatctgagagataaaacaatggatgacgaggagtacaggggagaactgaaacagctccagagtaaactgggggaactccataataaactgtacaggagacgtattcctgtgatcatcacgtatgaaggctgggatgcggcaggcaaaggaggtaacatcaaacgtattacagaagctctggatccccggggttatgaagtacatccaatcgcaagtccggaaccacatgagaaggccagacattatttatggcgtttctggacaagacttccgaaaaatgggcatatcgctatttttgacagaacctggtatggcagagttatggtagaacgtctggagggattttgcagtgaaaatgactggaaacgtgcctacaacgaaatgaatgagtttgagaaagaacttaaagactggggtgcagtcattattaaattctgggtacagatcgataaggatacacagctggagcgttttcaggagagacagaataatccggagaaacaatggaagatcacagatgaggactggagaaacagagagaaatgggatgcctatgaagtggctgtcaatgagatgcttcagaagacaaatacttcctttgcgccatggcatgtactggaatctgttgacaagaaatatgcccgtatcaaagcactcagaattgtgatctctgaaatagaaaaagcattaaaagaaaattaaattttgcgggaaatgtgtaaatgaatgataagataacagtctgcctgggtaagggcgggcaaagagaaatggcagaatcttttgccagaaagaacaatgttccgattatggacaaaccgggagaacatctgacagtaatgtttgactcccggggcgtatcacttaccggttatggcctgacatatcagggagattttgaaggaatgctgcacagagtcacaaacggaagactttcccatgaaatgctggtacgtgcggtcaaaactgagggagaacatctgaaagcaattgatgccactgcaggcatgggggaggatggtttccttcttgcagcatatggctatgaggtgacattatacgaacagaatccggtgatcgccgcacttttgaaggatgcgctccggcgtgccagaaagcatcccgtattaaaagacattgcttccagaatgaaactggtagagggtgacagtgtgtcatgtatggagaaacttatggatccggtagatgtgatctatcttgatcccatgttcccgaagagacagaaatccggtctgataaataaaaaacttcagctgatccagaaacttgaacctccatgttctgaggaaaaagatctttttgatgcagctatcaaagccggaccttccagaattatcgtaaaacgtcctcttaagagcgtctgtcttgatggaagagagccttcttatatattaaaaggaaaagcaatacgatatgactgttatgtgatgtagaaggtttatcagcacattgcagcagccctttatttttgagggctgctgcaatgtatttttttccattcccggataaattccatttgttcctgatcggagatttcctgggaggcagcgtcatttccggcagctacacagcagagcaggacgaaggtctgaaagagtaaaaataccagtatcaataataatgcagtcataatttgtctccttaatattatgcagatggttacagttattttatgaaattgctataaggatatttttcgggatttctgtaacagattctgtatatgcctgttgttttgcatatcagaagtatctgcatatcatggaagctttatacattttatttacagaaaaacggagatatgacaggagaaactgtcggacacaaaaatataatcttccgaataatttaaagtaagacgcaaatgttcattgtctttgcagcgacctgatgaatagttgcggtaagatttcattatccagatgattcggaggattttttatgaagaattcagatgattccggatatacaggaaagcacgtgggtgtgtgtgttctggataccgggatttttcctcatatagattttacagggagaatacttgcgtttcaagatttcatcggacatcgtatcagaccttatgatgataattctcatggaacccatgtatgtgggatcattggcggtgacggaagggcttcggaaggacggatcagaggaattgcccccgggtgtagcctgatagttctgaaggtgctcgacagaacgggaaatggcaggaaagaagatgttttgcaggcttttcgctggattctggagaataagagatattatgggatacgtgtagtgaatatctcggtgggaacaacctgcaggagagcagaagatcacagagttctgattgcgggtgtggaacaactttgggatgcaggtctggtggtagtggctgcggcaggaaatcagggaccgaaggcaagaagtgtgacagcaccgggaagcagccggaagattatcacagtaggctccagcgatctgcttacaggacggactgccatatccggcaggggacctacatttgagtgtgtttgtaaaccggatctggttgcacccgggaatcatgttcttgcctgtgcaccgggagcagataacggatatggagtgaagagtggtacttctatgtctacacctctggttgcaggggcagcggcattgatgcttgagaagaatccggagctgactaatgttcagatcaagatgaaattgaaagaaagtgccagggatatgggattgccaaagaatcagcagggatggggagaactggatctggaacgttttatggaactgtgatcagtaatcttttatttcacaaaattattgctttagtgtataaaagcattgacgaacggtctgttttcggctatcatgatagttaactggatgagagccaaagaggaggattaacatgaaaaaaattcagatgcagacaccacttgtggagatggatggagatgagatgaccagaattctctggaaaataatcaaagatgaacttcttcttccgtatattgatttgaacactgagtattatgaccttggtctggaatacagaaatgaaacggatgatcaggtaactgttgatgcagcagaggctacaaagaagtacggcgttgcagtgaaatgtgccactatcactcctaataaggcaagaatggaagagtataccttaaagaaaatgtacaagagtcctaacggaacgattcgtgcaattctcgacggaactgtttttcgtgccccaatcgtagtgaagggtattgaaccatgtgttaagaactggaagaaaccgatcaccatcgcacgtcatgcctatggtgatgtgtataagaacacagagatgtatattgacggccccggagatgcttatctggtatttgaaggtgcagacggacagcagagaaaagagctgatccatcattatgagggaccgggtgtgcttcagggtatgcacaatctggatgattctatcacaagttttgcaagatgctgttttaattatgcactggatacaaaacagaacctgtggcttggcggtaaggatacgatctccaagatttatgacggacgttttaaggaaatctttgcaactatttatgaagatgagtttaaggagaaattcgaggcagcaggcattgaatatttctacagcctgatcgatgatatcgtagctcgtgtcatgaaggctgaaggcggatttatctgggcctgcaagaactatgatggagatgttatgagcgatatggtttcttcagcatttggttctctggctatgatgacatctgtactggtatctccacagggatattacgaatatgaagctgctcatggaactgtacagagacattattatcgctatctgaaaggtgaggagacatctactaactctgtagcaactatttttgcatggaccggagctctgagaaaaagaggtgagctggacggcaataaagaattgatggaatttgctgataaactggagaaggcgactctggagacgattgaaagcggtaagatgacaaaagaccttgcgctgatcacttctcttgaggatgtgacagtactgaacagcaaagatttcatccttgccatcagagagagactggatgaaattttataatgtcagaaattatccggtaatgtttctataacattataaagttctccgggcaggatcacactgcagcggagaaacctgtaaaaagttataaactgcgaaaatgggaagaaacctgcattatgcaagttcttcccatttttcatataatccttctaattcttcggtaatggcggctttctctttgctgagtttcgcacattctgccacatttgtgcagatatccgggagaatcatggtttcgtcgatctctttatctctggtctcaagttcttcaatgcgggcttctactttttttagttcattctctcgttttcgctggcgggcctgttcttctttctgctgctgccaggaaagcttgttatcagaagcctgctttgcttctgtcacagcctgagcggcagccggagcatatttttccgttagctcttcttttttctccagataatagtcgtaatctccgatataatttacaattgcctgattggtcagatccaggatccgggtagctgtctggttgatgaagtaacggtcgtgggaaacatagaatactgttcctgtgtaactgttcaatgcctcttcaagaatctcttttgaagcgatatccagatggttggtgggctcatcgaggatcagaaagtttgcttcggacagcatcagcttggcgagggaaacacgacctctttctccgccggacagagcggagatcagtttgaatacatcatcccctgtgaaaaggaatgctgccagcatatttcgaatttctgtttccgtaagtgtgggataagcatctgagatttcctcaaaaatagttttctccatatgaagaacatggtgttcctggtcatagtagccaatctgtaccttggaaccaagagtaaatctgccgctgtctgcatcgatcagcccattgatgatctttaacatggtggttttgcctgtgccgttattgccaatcagggctacacgttctccacgtttgatctcaaaggagatgtcactgaaaagtgtctgtccgggaaaagatttggaaagactttccacagtaaggacatcatttccgctgacaaatcttggttccagggaaatgcgcatctgattctgaatctcctgtggtttatcaatgcgctggactttatccagcattttctcgcggctttccgcacgtttgatggatttctcgcggttaaaggatttcagcttggcaatgactgcttcctgatgtttgatatcccgctgctggttcaggtaggctttgtactgggcgtcacgcagctgggcttttttcagggcataggcagaatagttgccactgtacatacgcatatttcctgcttcgatttccacaacttttgttacgactttgtcaagaaagtaacggtcgtgggatacgataaatacagcacccgggtaattcagaagataggtttccagccaggaaatactctccatatccagatggttggtaggctcatccagaagaagaatgtcagggctggcaagaagcagtttacccagagctacgcgggttttctggccgcctgaaagagtttctatctggcgttcgaaatcttcttctgtgaaaccaagaccttttaatacacccatgatctcacttttgtaagcgtaaccattttccagttcaaactggtgactcagtcttgtgtaagtattcatcaggctgtccagagcatctccggtggtggttttcatttcctgttccagagagcgcagacggttctccatatcaataatgtgctgtttggtggaaatcagttcttcgtaaatggtatgatggccatgaatgtcctgatactgggcaaggtagccgatatttttatctttggcaagtaccacgtttcctgaatccggggagagctcatgcataatgattcgcagcagagtcgtcttgcctgcaccgttattgccgatgagagctgccttttcgcggtcttctatatggaaactggcatccttgagaatgattttttcgccaaaggatttacagatattctgacatgataaaatcataggaattcctccgtttgtaatttgtccgcgtactattataatcgaaaatgcctgtttttgaaagcattttaagagattttgtccagagaaaagaaagcaccggatggatgcatggaagaaaatatgatattccggggaatttttcagaatgaaattgataaaaaaatacagaaatatttggtcaaaaagtacaaatttaatttgacaataaaataacatctgggtataattgacatagataagctaaggagggaaaatttgtggaagctaaggaaatttcgaaagcggtaatcaagcgtctgccgcggtactaccgctacctcggtgaattgatggaggagaatgtagagcgtatatcttcaaatgatcttagcaagaagatgcatgtgacggcttcccagattcgtcaggacttaaataatttcggtggttttggtcagcagggttacggctataatgtacgctatttgtatacagaaatcggtaagatccttgggctggatactgtacatccgatgattattctgggtgccggtaatctgggacaggcattggccaattatgtggattttgaaaagcgcggatttaagctggttggtatttttgacgtcaatcctgtacttgaggggattgcagttcgtggaattgagattcagatgttgagcgatcttcctttgtttctgaaggagaatgaggttgagatcgcgatcctgactcttcctaaaaacaaagccaaagagatggcaaagattttaattgataatggaattaaggcaatctggaattttgcacatattgatctggatgccccggaggatgtaatggtagagaacgtacatctttcagagagtcttatgactttgtcctataacctgagtgagtacagaaaggaacatgaaggtatgtaagggataactgtgaaacacaaggctgtggtcatctgatcacagcttttctcttgtatgtaaatgtgttattgtaaacaggaggtgaacagatgagagagattgtaactgctgttgagatgaaagaactggatcataatacgattcagaaagccgggatatcgtctccggtacttatggagagggcggcattaaagacggttgaggagattgtacagagattaaagaataaagaaaaagagaaaatccttgtggtctgcggaaccggcaacaatggcggagacggattggcgattgccagactgcttcagttgagaggagtcagaacctggtattatattgcgggtaaggaagagaaaatgactgctgaaactgccggacagcttaaaacagcagaatattatcaggtgccccgggtgcataacctggatctggatgaatatactactatagtagatgccatctttggggttggactgagcagacctgtagagggaaaatatgcagagcttatcagtacaatgaaccgggcatctgcgtataaagtagctgtggatattccatccgggattgactcagataccggatttgagaaggggattgcattccgggcagatcttacggttacctttgcttttcgcaaaagagggctgtgtttttatcccggacgcatgtatggcggtgagatcgttgttacggatatcggaatctattccatacccggaaagaaaatctgtatgcatcatctggaacgtgaagatttgaaaatgcttccggagagagttccctatggaaataaaggaaccttcggtaaggttcttcttatagctggcagcgaaggaatgtgcggagctgcatatctgagtgcagcagctgctctgaaaagctctgcgggaatggtgagaattcagaccgtggaggccaacaggattccgttgcagacactgttgccggaagccatgatcacctgtgattttgatgagaaaaaaaaccaggcaatgcttgactggtgtgatgtgcttgtgataggaccgggtcttggaactggagcgcagagcagggaaagagctcagtggttcctggcgaaggcagctgagtgtaaaaaaacagtaattctggatgcagatggcctgaatcttctgtcagtccatgacaactggaagtgttttatcggggaacatgtgatcctgacacctcatattggtgagatgagtcgtctgtgcggaaaagaaatcggtaagatccaggattgtctggcacagactgcagctgattatgcaaaggagtctggagcggtttgcgttctgaaggatgcctgtactgtggtggcagatgcttttggagatatgtatttgaacatttcgggtaatgcaggaatggctacagcgggaagtggagatgtgttaagtggtgtgcttgccggtatacagtgtatgtacctggcagcagaaaagaaattttctcctgttatgctggctgcacttggtgtatatgtgcatgggctggcaggtgatctggctgctgaaacagtagggcagcgagggatgaccgcaggagatatcatctgttttctgccggaaatactaagatagaatattcattttgaggcagtaaatctgtgaaacaatttgcagatattaacatgaaaaaataacagaggaaaattattatgaagaaagatagcagagtaaaagcagtcatttcactggatgcagtagaacataatttccgggaaatgagaaaaaatattgcagaagagacaaagatgatcgcagtcataaaggctgacgcttatggacatggcgcggtgccggttgcacatctcattgaggattatgattatatctggggatttgcggctgcaactgcggaagaagcgattcatctgcgagaagccgggattacaaaaccaatcctgatccttggaattgtttttgatgaatattttccggaacttgtccgttatgagatccgtcctgcagtgtgcgaatatgaggaggcaaggaaactttcagacgaagcggttctgcagaaaaaaactgtacatattcatattgctctggacacaggaatgaccaggatcggttttgcggatgcacaggaaaatgtagaggaaattaaaaaaatttcagaacttccaaatcttgagattgagggtatgtttactcattttgcaagagcagatgagtatgacagaagtccggctatggtacaattggagcggtatctggatttttcaagacgcgtagaagaggcaggagtggaaattcctctgcatcactgttctaacagtgcgggcatcatacgtatgccggaagcaaatctgaatattgtccgtgccggaatcacaatttatggaatttatccttcttctgaggtggagagagatattgtaaagcttgagccggttatggaacttaagagtcatgtgacttatgtgaaggacgttcctgccggagcagcgatcagctacggcggtacttatgtggctgacaggaagcttcgtgtggcaactgttccggtgggctatgcagacggctattccaggcagctttccaataaaggctgggttctgatacatggacaaaaggctccgatccttggcagagtctgtatggaccagtttatggtagatgtgactgagattggtgatgtgaagaagggcgatgaggtaacactgatcggcagagacggggatgagtttatcggtattgaggagattggtgatctctgtggcagattttcctatgagtttgcctgtgatatcagcccgcgtgtgccgagagtctatattaaaaacgggaaagaaatataatgttactgtttgctgaatagagacgaagtgagcgataactgatttttatataccacgcatgtatacacaagaaaaaggtggaaatactttatcttaaccggacaggaaatatccggctgataacaaggtttcttcttatggcaatgttgtaaattgaaaccggaaagaatcggagtgtgaattgtgtggtaattaaaagaggggatatattttatgctgatcttcgccctgtagtggggagtgaacagggtggaatccggccggttctgatcattcagaataacgtaggtaaccggcacagccctacagtgatctgtgctgctattacatcaaaaatgaacaaggctaagcttcctacacatattgagatcaatgcggaactctatgggattgaaaaagattctgtgattttgctggaacagcttcgtactatagataaaagaagattaaaagataaagtctgtcatctggatgatgcgatgctggataaggtgaatcatgcacttgagatcagtctggagcttacgttctgattttactttttaagggatatatcatctgatccggtattgcgattttttggcttgcatgtctcggatagtagtgcgtgaacaataaatgaacagtaatttttggtatctctgtccggtcagtatcttgacgattaatggagaaagtgatatattttaccagtaattacgcatattcaataaggaggagactgaataatataatggaagatggcagtagtatgcccctctggggcttatttgttttactgttactgttgtggctgaatggaatcttttacgggtttgccgcagcgctgagaaacataagtgagaatgatacacagaagaaagcagaggaaggcgataaaaaagcacagatgctgatgactctgatcgacaaaccggcgcagtttgtcaatgtaattccgctgatcgtaatggcatgtggtatttgttttggtacttttctggtcccatatgctgtggatgcattttatccatacataaagcatgtgcctgcactgatcctggtaatggcattgtgcgtgatttttcttgctgcaatcggtattctggcttttcggcgggttggtacttatcatcctgaagcttatgcatataagtatctgaacctggtacatttctggctgaatctgttaaagccttttactgtatttgtcacctggatcgccagactggcagcagtgccttttggtgtggagataaaccgtacagaaaagtctgtcacagaagaggaaatcatttccattgtagatgaagctcatgaacagggcgtcatccaggagaatgaggcggaaatgatccagaatatcatatcttttaatgagacagaagcccatgatatcatgactcacagaaagaatgtggtggcctttgacgaggagatattgctcaagaacatgattgacactatgctggaagaggggaattcccgttatccggtatatgaggagaatattgacaatatcaaaggaattgtccattataaagatgcgcttaagtttatgacacagaatccctgggcgaagttcaaaccgttgaaggaactgcccggaattatccgccaggcatccctgattcctgaaacaagggggattggagatctttttcatactatgcaggccagaaagatccatatggcaattgttgtggatgaatatggccagacagccgggatcgttaccatggaggatattctggaggagattgtcggagatattctggatgaatatgatgaggatgaaattacgatccgcgcacagaaagataacagtctgatcattgacgggcttgcttatctggaggatgtggaagaagagttggatgcagattttggggatacagagtttgaaacactgaacggttatctgaccaatattctgggacatattcctacagataaggatgttgatacaagcataaaagcgattggatactgctttacgatcttgtctattggtaataaaaccattggcaaggttaaggtggagcgggataataatgttgctgtataaacagcagcagataaaaataattaacaaaaggagaaagaaagatgtcaggacattcaaaatttgcaaacattaagcataagaaagagaaaaacgatgcaaaaaaaggtaagatttttacagtaatcggacgtgagctggttatggctgtcaaagcaggcggtccggatccgaataataacagcaaacttcgtgatgtaattgccaaagcgaaagcaaacaacatgccaaacgatacaattgaacgtggtatcaaaaaagcagcaggtgctgattctgcagataactacgagaaagctgtatatgaaggatatggtccgaacggtgttgctatcattgttgagactctgacagacaacaagaaccgtacagcaggtaatgtacgtaatgcatttacaaagggtaacggaagcatcggaactcagggatgtgtatcctatatgtttgatcagaaaggtcagatcattattgacaaagaagagtgtgagatggatgcagacgagattatgatgcttgctctggatgccggtgctgaggacttcagcgaggaagaggacagttatgagattctcactgctccggatgatttcagtgcagttcgcgaagctctggaaaaagcaggtctgcctattgcagaagcacaggttgccatgattcctcagacttatgtggagcttacagatgagcaggcactcaaggatcttcagagaactctggatcttctggatgatgacgatgatgtcacagattactggacaaactgggatgagcagtaaaataccgcaggtatattgagactgcctgttttgggttattgctgtcggacatgtatagtttataaaagaaacacacataatacctccatagagaaaatggaggtatttttatgtctgaaaacagatatggagaaaaaagagaagagtctgaaacagggatgaagctgcaaaactgtgagacacaggagtcagaaaataaagttcaggaaagtaccaatgagcagatcaaagatatgggacaggtggttttaaacagcaattcccgaaaacacaaggtagagcttctgaccatcattggtgaggtggaaggtcatgagtctgcaccctcccattccaaaactacaaaatatgagcatgtacttccaaagcttgccatcattgaggatgatgaagaaatagaaggattgctgatccttttaaacacagtgggaggagatgtggaggctgggcttgccattgcagagatgattgcctcattaagtataccaacagtgtcactggttctgggcggcggacattctatcggagttccgatggccgtatctgcggactattctttcgcagtaccaagtgctacgatggtgatccatccggtacgttccaatggtatgtttatcggagtggctcagacttaccggaatatggagaaaattcaggaccgtatcactacatttatttccgaacactccagagcatctcagaaacgtctggaagagctgatgcttgatacttctcagctggtaaaagatgtaggaaccatgctggaaggaaaagaggcggtaaaagaagggctgatcgatgaggttggcggtattaaggaagcgttggcaaaattatatgaaatgatagaaaaagagtgttaaaagtgaaaaaaatcttatatatgctacaaatcaacccttgccatatgtcagattttggcgtattattaatagaggtttattatttgcgaggaggaaaaccatgtataagattttaaaagctgaaacactggcagctaagatccatcttatggttgtacacgcaccgcgtgttgcaagccattgtcagccaggacaatttattatcgttaagttagatgagaagggtgagagaatccctcttactatctgtgattatgatcgtgaagaaggtacgatcacaatcgtattccaggagattggtgtatctaccatcaagatggcagaattaaaagcaggagatgcattccgcgatttcgtaggacctcttggatgtccttctgaatttgttgaggaagatatcgaagaattaaagaaaaagaaaatggtatttgttgccggcggggttggtacagcccctgtttacccacaggtaaaatggctccatgaacatggaatcacagcagatgttattcttggtgcaaaaactaaggatatggttatccttgagaaagaactgggagaagtttccaatctttatgttactacagatgacggttcctatggccgtgcaggtatggttaccaagactcttgaggatctggtaacaaatgaaggcaaacattacgatgtctgtgtagcgatcggaccgatgatcatgatgaaatttgtctgtcttcttaccaagaagcttggcattcatacaattgtcagcatgaacccgatcatggttgacggaacaggtatgtgtggcgcatgccgtcttcaggttggcgatgagattaagtttgcatgtgtagacggaccggaattcgacggacatctcgttgatttcgaccaggctatgaagagaagccagatgtataagactgaagagggacgtgcattactgaaacttcaggaaggtgatacccatcatggcggatgtggacattgtggaggtgacaagtaatggcagatgcaaagatgttaaagaaagttcctgtaagagaacaggatccaaaggtgcgtgcaacaaactttgaagaagtttgtcttggatacaatcaggaagaagcaatggaagaagcacagagatgcttaggctgtaagaaaccgaaatgtgtggaaggctgtcctgtatccattaatattcctggatttattgaagagattaaagagggaaagatcgaagaagcatacaaagtgatcggattatcctccgcacttccggctatctgtggacgtgtatgtcctcaggaatcccagtgtgagggtaaatgtatccgcggagtcaaaggtgaagctgtttctatcggtaagctggagagatttgttgctgattatgctctggaacatgatatcaaacctgttggagcagaagttaagaacggacataaagttgcagtgatcggttccggtccttccggacttacctgtgcaggtgatcttgcaaaagctggttatgatgtaactgtatttgaagctcttcatgaacttggaggtgttcttgtttacggtattccggagttccgtcttccgaaacagaaagttgttaagaaagaaattgaaaaagttaaagaattaggtgttaaattcgagactaatgttgttatcggtaaatccacaacaatcgatcagctgatcgaggacgaaggatttgaagctgtatttatcggatcaggtgccggacttccaatgttcatgggtatcccgggtgagaatgcaagcggtgtattctctgccaacgaatatcttacaagaagcaacctgatgaaagcttttgatgattcttatgatacaccgatcgcagcaggaaagaaagtagcagttgtaggcggtggtaatgttgctatggatgctgccagaacagctttaagacttggtgctgaagtacatatcgtatacagaagaagtgaagcagagcttcctgcacgagcagaggaagttcatcacgcaaaagaagagggaatcatctttgatcttcttactaacccgaaggaaatccttgtagatgagaacgggcatgtaaaaggtatgaaggttgtcaagatggaacttggtgagccggatgcttccggaagacgtcgtccggttgaaattccgggatctgaatatgacatggatgtagatacagttatcatgtctcttggtacttccccgaaccctcttatctcttctacaacaaaaggtcttgaagtcaataagagaagatgtatcattgctgaagaagaaacaggtaagacatctaaagatggtgtatatgccggcggtgatgctgttacaggtgcagctactgttatccttgccatgggtgcaggtaaagctggtgccaaaggtatcgatgaatatcttaaaaataaataatgtaaatggtacttgacagattttgacgtctgtggcatgattactagtgttgataatcatgaaaagcttagaaggtgtttacagggatttattttccgtcagagagaggaagccatcggctggaagctgcctcaggttcagatatttcctgaatttcccaccggagccgcatttctgaatgacagtatttactgagtaggaaatgacgttactgcgcgttaagcagaccgagagcctgtagaaaatgcaggaagcagggtggtaccgcggatattttgctccgtccctttagtgggacggagttttttgtttgccaattctgctattataacatgaattgcgagaactgcttttgcaacggagcgatttgtggctatcaagtcagagtcagattttacgttactgttcattctgttctcagtaacgatttttcttctctgacattatgacataaaggagaaagagaacatggatatgaaagaaagacttcaggaactggctgaagcagccggaaaacggatcagtgaatccgaaggtctggaaaaactgaacgaagtacgtgtggcataccttggtaaaaaaggtgaattgactgcaattttaaagagtatgaaagatgttgcaccggaagagcgcccgaaggttggacagcttgtaaacgaaacaagaagcaagatagaagcacttcttgatgaatctaaacagaaactggaagaagcagcacgtgaagagaagatgaaacaggaagtgattgatgtgactttacctgcaaagaaagctaaaatcggtcaccgtcacccgaacaccatcgccctggaagaagtagagcgtatctttattggtatgggttatgaagtagtagagggaccggaggtagagtatgcggattacaactttactaaactgaatattccggaaaatcatccggcacgtgatgaacaggatactttctttatcaacgattctatccttcttcgttcccagacttcaccggttcaggcacgtactatggagaaaggaaagctgccgattcgtatgatcgcacctggtcgtgtattccgttcagatgaagtagatgcaacacattctccttctttccatcagatcgaaggtcttgttattgacaagaacatcacttttgcagatcttaagggaactttgcaggagtttgcacaggaattattcggacctgagacaaaaactaagttcagaccacatcacttcccgttcacagagccaagcgcagaggtggatgtatcctgtttcaagtgtggtggtaaaggctgccgtttctgtaaaggttccggctggattgaaatccttggctgcggtatggttcatccgaatgtattaagcatgtgcggaattgatccggaagaatacacaggattcgcatttggcgtaggtcttgaacgtattgcacttctgaaatatgagattgatgacatgagactgctctatgagaatgatatccgtttcctgaaacagttctgatgaaatgactgtctgaaataacagagctatgcagccaagaggaaatttctgtccgggaaagctgctataagtctgagctataatatagaaagaggattaacaaaatgaatacttcattatcttggattaaaatgtatgtgccggatcttgatgtgacagcacaggaatatacagatgccatgacactgacaggaacaaaagtggaaggctttgaaaaactggacgcagatctggataagatcgtgatcggtcagattgaaaaaattgagaaacatccggatgcagataaactgatcatctgccgggtgaatatcggaacagagactgtacagattgttacaggcgctcctaatgtaaaagagggagataaggttcctgttgttcttgacggcggacgtgttgccggtggacatgacggaaagaaaacaccgggtggaattgaaatcaaaaaaggaaaacttcgcggaatcgattcctatggtatgatgtgttccatcgaagagctgggaagcacaagagaaatgtatccggaagcaccggaatacggaatctatattttccctgaagacgctgttgtaggcgagagtgcgatcaaggcactgggcctggatgatgttgtctttgaatatgaaatcacatccaatcgtgttgactgctacggcgtactgggaattgcaagagaagcggcagctacgtttaatgagaaattctgtcctcctgttgtagagtgtaagggaaatgatgaaaaagcttctgactatgtaaaagtaacagtagaagatccgaaactttgtccacgttactgcgcaagagtcgtaaagaatgttaagatcggaccatctccgaaatggatgcagagatgtctggcttccaatggaatccgtccgatcaataatctggtagatattacaaactatgtaatggaagaatttggtcagccaatgcacgcatatgatctggacaggattgcaggaaaagaaatcgttgtacgtcgtgcagagaatgatgagaaatttgtaacgctggatggacaggaacgtaccatggatgatcaggtactgatgatttgtgacggtgagaaagcagttggtattgccggtatcatgggtggagagaattctatgatcacagacgatgtaaaaactgttcttttcgaggctgcatgttttgatggaacaaatatccgcctttcttccaagagaatcggtctgagaacagatgcttccggtaaattcgaaaaaggtcttgacccgaacaatgcgcaggcagctatcgacagagcatgccagctgatggaggaacttggggcaggtgaagtcgtaggtggaatggtagatatctgcaatgaagtaagagaaccatccagagttcctttcaaaccggagaagattaatgctcttcttggaactgacctgacaccggaagaaatgcttgcttatctggcaaaagtagaactgacctatgacgaaaaaacaaatgagatcgtagctcctactttccgtcaggatatccattatgtagctgatgttgcagaagaagttgcaagatttttcggatatgataagattcctactactctgcctacaggtgaagctacaacaggtaagcttccgtttaaacttcgtattgaagcagtggcacgtgatattgcggaatattgtggtttctctgaaggaatgacctattctttcgaaagtccgaaggtatttgacaaattaagacttccggctgacagtaagctccgtcagggaatcgtgatcagcaatcctctgggagaagactacagtgtcatgagaacaactactttaaacggtatgctcagttctctggctacgaactataacagaagaaataaagatgtacgtctttatgaacttggtaatgtatatcgtccgaaagcacttcctcttacagaacttccggatgagcgtatgcactttacacttggtatgtatggaaacggcgatttctttgacatgaaaggtgtatgtgaagagttctttgagaaagtaggaatgagagataaagtagattatgatccaaacagcggaaaaacttaccttcatcccggaagacaggcaaatatggtttatgatggtaaggttgtgggctatctgggagaggttcatcctctggttgcagatacttatggaatcggtgataaggcatatgtggcagtgattgatatccttacggttcttgaatttgcaagtttcaaccataaatacacaggaattgcaaaatatcctgcagtaacccgcgatttaagtatggtcgttccgaaaaccgttcttgcaggacagattgaacatattctgactcagagaggcggaaagattctggagagttatcagttatttgacatttatgaaggaaaccagattaaaggaggatataaatccatggcttattctctggtattccgtcaccatgacaagactctggaagagagcgagattacagctgcaatgaagaaaatcctgaatggcctgacagatcttggaatcgagttgagaagttaatgctgatttatgtattaagacatgggataactcagtggaataaactgaaaaaagtgcagggggcaatggatattccccttgcaccggaaggaattgaactggcgaaaagaacaggagaagcattaaaagatgttccgtttgatatctgttttaccagtcctctggcaagagcgagacagacagcacattatgtgctgggaaacaggcagattcctgttattgaggataaaagaatccaggaaattgatttcggagttcttgaaggaagccggtttaaggatgaacaagggaagatcatcagccatgaaatggaaattttctttgaagagccacagaaatttgaacgtcctcaaaacggcgaaaacatttctgatatcctgaaacgcaccagagaattctggttggagaaaacgacagatcctgctctggcagacaaaacaattcttgtttcttctcatggatgtgcagttcgtgcactgcttcagaatgtctatcaggatccggaacatttctggcatggatgtgtgcctccaaactgcagtatcaatctgcttgaagtaaaagatggaaaagccagatttctggaagaagataaagtttattctgaaatataacaattctgtaaaataatccggtggaaaactgtgctttgagtacagcttttctgccggacttttaatatattttgttactgtttatacaccactatcccgagacatacaagccaaaattccattgccgcaggcaatctggaatgaattttggctgttactgttcactggtaatatcccgcgaggtgttttttgtgagcgaaggtcacagaaaacccgagatataccgcgcgaatttatgcgattagcataaattctgtgcatcgcgaagcgtgttactgagaacggagtgaacagtaacttttggctacgttactgtgaacagtaactatatttttacttgtgacagatatgacgttgtgatatgatatacgaaaaaggaaattgtctgtaattttgtgcagaatctgcaaataatcacaggaggtgtattatgggcaaaaaaattatgaatacggttctttttctggtggtgcttggcggatgtgttgccatgacgctgctgaccgggaatggttcatcaggcacgatgatttataactttgcattcctcgctgttatggctgtgatctatctggccggactgtttggcggtatgtttcgggtagacagcattggagaggctcttgcaagaggaacgcaggagctttccagtatattcaaaatacccggaaaagccaaaagcgaagatctttcctgcctgaaggggatgtttgaacataaatatctggatgacagaatggacagctttgtagatgccatggagaaaaaccaggaaggaatcggagatgttgaagattacataaatgaggacgagattgatcttcatgtacataagaagattctggaaatggcaccggatatttttaccagccttggtattcttggtacttttattggtctggtatgggggcttaagagttttgagccatccagctatgagacaatgactacctctgtatctgccctggtagatggtatcaaagtagcattccttacttctatctatggaattgcatttgcactgatctacagttccggaatgaaaagcgtttattccggaatggatgcgaagcttcagggatttctggagagatttcatctttatgtacttccggcggctgagagcgagtcaagaaacctgatgcttgcaagtcagaaggttcagacaaaagccatgaaacagatggcagagcagcttacctcacagatggcagagagttttgagaaagcaatcaatcctactttccagaagatgacagaatctctggagattctgacagaatctgtaacaaaatgtcaggaggatgtggttcaggatatcctgcgtacttttttgcgggagatgaacggttcatttaaaatgcagttcacagatttcaatgaagctcttgtacagctgaaggaagcgcagaaagaaaatattgattatactacaaggctctatcagacgatgagtaatcagctgaatacctcatatgcaaaacagagcgaagctatgaaagaccttgtaaatgaactgggacaggttcagggccgttatatgtctacggcaacaagaatcacacaggataatcaggaaatccagaagcttcagcagcaggattatcagcgcattgcggattatctgcatgaatccgagaaatcttctgccaaattctgggttgcctgcaatcagacaatgcagaaatatgtggaagctgccgcgcagggaatggaaaaggtttcggctgcaaatcaggcaggaaaagatgtgcttgaggctaaccgtaaactggtagaacagttggatgtaaagatgaaagactttgtatcttatcagaagatgacttacgagacaatggaagaggtacgcagactctttgcagatatttctgttcagaaagaagacaacaatatttatctctcaggcggaaaatcagctcagagtgcggcacagaaagaatctgtggaggaagtacgcaaacttctggaggaacagagcgagcgtcaggaagcacttctggaggagatgaacaaaaatatgaagaatatttccaaaaaccagaaaggtaaattcagcttattcaaataagaaaaggagagaaatatgcgcaaaagaaagaaatcagaagagggcggatttaatgtctggcggtcttattctgatatgatggccggtgtgctgctcctttttatactgattatgtgtgtgactctttttcaggctcagaaaagttataatgagagtattaaggagagagatgacaagatagctcttcaggagcagtatacagcggaaattctggcacagcagagtgagctggacgagaaaaacagcaagctgagttcccaggatgaacagcttgacaagcagaaaaagcttcttgcagaactggcagcacagttaaaggaacagcaggccagccttgatgaaaaaacatctcttcttgccacacagcagaagaaaattgataatattatcggtgtcaaggcagatgtcattgaagcattgcagaaggagttttccaaaaacaatgtaagtgttgatattgatgctcagacaggtgctcttaccctcaatgcaaatgtattatttgactatgataagtcagaactgacagatgagggcaaacaggaacttgcagatatccttccgatttactgtaaggtgcttcttcagaaagattataagaagtatctggctgagatcatcattgacggttatacagacacagacggagactatgattacaatctggagctttctcagaaacgttctctcgcagttgcacagtatttgacggaaatcagggagaacttcctgagttctgatgagatttcagaacttcagaattatctgaccgtaaatggtcatggttcagccaatccggttctggattccgatgggaatgtagataaggatgcatccagacgagtggaagtaaagtttcgtctgaaagatgatgagatgataaatgaacttaatcagattatgaatacagataagacttctgattctgaaaaatccggcagcaattaaactgccggatttttcaattccggagtgtgtttgaaaaatgctttgatgcagatgctttatcttacaattcacgaaagataacgagtaattttaccaataacagttcacatttccgagagaaaatgtggtatgataaaacagtacacagtttcctgtaatggtgatgatgcgctgtaccctacataagaaaaaagaaagaggaattatcatgtctttgaaaattggaagaaacgatccatgctggtgtggaagcggaaaaaaatataaaaaatgccatgaggcatttgatgaaaaaatggaaataatgaagcagaaaggatatgcagtgatcgatcatgatctgatcaaaacacccgaacagatcgcgaaaataaaagaaagctgcaaaatcaatatcgcagttcttgattatgtggaagagcatattaaaccaggtgtatccactgaagagattgacagatgggtacatgaagagactgtacggcatgggggaatcccagcaccgttaaattacgaaggatttccaaagagcgtgtgtacttctgtaaatgaagtggtatgccatggaatcccggatgaagagcagattctgaaagagggagatattatcaatgttgatgtatctacaatatataatggttattattctgactcgtccagaatgttctgcatcggtaaagtgagtccggagaaagaaaaacttgtcaaggtcacaaaagaatgtgttgagattggtatttcccaggtgaaaccatggactccgatcggaaatatgggaagtgcagttcataaacatgcagtagaaaacggatattctgtagtcagagaaatcggtggacatggtgtgggagttgagttccatgaagacccatgggtaagctttgtttctgaagagaatacaggtgtcctgatggttccgggtatgatgtttaccatagagccgatggtaaatatgggaagcgatgaaatttatacggatgagattgacgagtggacagtccgtacagaggacggacttccttcagcccagtgggaagtaactgttctggttacggaaacaggatgtgaagtaatctgctggtaaaaaatttgcaaaaagtattgcaatacatcaggctatatagtataatcacaactgttgtgaaaaaagatggtcctctgttacaggatatgtattaagaacatccatataagaataggagaaaatacaatgaacgaaattatcaaaaacatcgaagcagctcagttaaaagctgaagtaccggcattcaacacaggtgatactgtaagagtacacgcactgatcaaagaaggaaaccgtgaacgtgttcaggtttttgaaggaacagttctcaagaaacagggcggaagcaacagagctacatttactgtaagaaagagctctaacggagtaggcgttgagaaaacatggccgcttcattccccacatgtagtaaaagtagaagttatccgtcgtggtaaagtacgtcgtgcgaaactgaactacttaagagatcgtgtaggtaaagcagctaaggttaaagagcttgttaaataatttcatgaattagcagaagaagggacaataacttgtgtattgtccctctttttccatctgtcaggagatttggatgaatatcagaaaatggaaagatagtccggcactgaaagagaccagagatatgctggaaataaaacttgaagataaaaaagtccggggaatccttaactggatatttcagatagcggtagtgctcatttttggcattctggcgggaattgcgctgtttcaatcagtgactgtacaggagagtaccatggagcccacactgcaggttggagaacgcttttttgtaaacagggctgtttataaagtatcctcacctgaacggggagatatcattgtatataaaaccagtggaagtgatgatgcggctctgcatatcggccgcgtgatcggtctgcccggtgagactgtacagatatccaacggagcagtattgatcaacggagaagtatataatgaaaataagaattttcctgaaatcagtaatgcgggattggcatccgacggagtgtctttggaaagcggtgagtattttgtacttggcgataacagaaataacagtgaggacagccggtatggtgatatcggaaatatcaataagaaatatattgtgggaaaggtatggtttgtcatttccccgaaagataaatttggatttttgaaaggttaggtgtatatgaacgtacagtggtaccctggtcatatgaccaaggcaaagagacagatgcaggaggacattaagctgatcgatctgatcattgaacttgtggatgcccgcgtacctctttcgagcagaaacccggatatcgatgaactgggaaaaaataaatccagactgattcttcttaataaatcagatctggctgacgagcgccagaatgaagcctggaaaacttattttcaggcaaagggattttatgttgtaaaagtagattccagaaatggttccggaatgaaagcaatcaataatgtgatccaggaagcatgtaaggaaaagatagaaagagacagacgccgcggtattaaaaaccgtccgatccgcgctatggtagtgggaatcccgaatgtaggaaaatctacatttatcaatacctttgcaggacgggcctgtgcaaagaccggaaacaagccgggagttacgaaaggaaaacagtggatccgtctgaataagggagtagaacttttggacactcctggtattttgtggccgaaatttgaagaccagcaggtgggaatccgtctggcatgtgtaggttctatcaaagatgacattctgaatatggaggaactggcactctggctgatcgattatctgcgcgaaaattataaagggattctggcagagagatatcagatcacagaggagggaacttctgtggaagttctggaggcgattgccagagccagagggtgtctgaaaaagcaggaagagctggactatgccaaagcttcgctgatactgtttgatgatttccgttctggaaaaatggggcggatcacattggagtgggcgccattatgaaaacaatagctgagattaaagccgagtttgctgcagcagatatgagcagctacccggctttatatgaaatttataaagaagatacaagaagtggtgtgcaaaaactgatcgcacagtgccgcaaaaaggaagcagctctggaagcggagaagcagcgtattgaaaatatgaaggtatatgagcataaatatgaacatcttggttatttatgcggaattgatgaagtgggaagaggccctcttgcaggcccggttgtggcatgtgcagtaattctgccacaggacagccggatcctttatctgaacgattccaagaaactcagtgcttccaaaagagaagaactgtatgatgtgattatgagggaagcggtttcagtaggaatcggtatgcgcagcccggagcgtattgatgagatcaatatccttcaggctacttatgaggcaatgcgggaggcggtaagtaaactggaagtggttcctcagcttcttctcaatgatgcagtcacgattcctcagatcaccattccgcaggttcccattattaagggagatgcaaagagtgtttccattgcagcagcaagtattgttgcaaaagtgacaagggacagaatgatggaagaatatgataaagtgtttccggaatatggttttgcatcaaataagggatatggttctgccgatcatattgcggcactgaaaaaatatggagaaaccccgatccacagaaagacctttattacacatttcatataaacagtcgcaaaagggttactatccttcagtacacagcaatacactgagtgatgcacagtaacaacaaaagatgcctacatataaataatataaaaagaaatggatggaagaatttgcataaaaatacccggtctaccggaagttgttacgaacgaaaagctgctgattatctgaaacagcagggattatttattctgagatataattacagatgcagatttggagaaatcgatctgattgccagagatggagaatatcttgtttttgttgaggtaaaatacaggaaagacaatagttccggttattcgctggctgcagtaaatcctgctaaacagaaaaccatatgtaaggtggcaaggtattttcttacagtggaatatcacaatgtggatatcccatgccgtttcgatgtggcaggaattgacggggatgaaatacactgggttaagaatgcgtttgaatatattgcaatccgctaataattatagaaactgctttgatgaataatctgccatacagcaggaagggaataatgaaatatgaagataaaatggaacagtgaacagattccaaagatgaatgtaaaaaacaataaagatgttacatttcttacatatcccgcatatgaagaaatgaactggcttgttcatggattcagcacccgctttggcggagtgagcagaggaatctacagttctatgaacctgagttttacaagaggtgatgaggagtcctgcgtgaaagaaaattacagaaggatttctgatgctatgggatttgatatgaacagcatcgttacatctgatcagactcataccaacaatgtgcggaaagtaacagagaaagaccgcggaaagggaattgtgatcccgcgtgattatacagatacagatggaatgatcacaaatgttccggggctggttctcgcaaccttttatgcggattgcgttccactgtattttgctgatccggcgaatcatgcgatcggactgtctcattcgggatggagaggtacggttcagaaaatcggtgcagttaccatagaaaagatgtctgaagagtatggaagtaatccgaaagatctgaaagtggccatcggaccgtctatctgtcaggagtgttatgaagtcagcgaagatgtgattgaagaatttgaaaaggtttttgataagaaataccggaacaagctgttttacagaaaagaaaacggaaaatatcagttaaatctgtggatggcaaacaagattatttttctggaagcgggaatcccggaagaaaacatttccatgccaaatctctgtacctgctgtaatcctgagtttctcttttctcacagggcttcccatggaaaaaggggaaatcttggggcttttcttggcatacgttcataaaacctgaaattgttataagcacaacagtgcgaagtgagtaatcctgaatttgcagattaactgtacaatacgaaaaaggggggagctggttaacagctccccccttttcgtattcatctgccggaaaaactatctggaatttactttttccataagagacatgatcttttcgttgctggaacgaaccttctcaacggaaacatcatgattgatgatatcaatgatgctcgcaagatatttgctcatatttgcttctacataatatggtctttcgagaagttccggaatgcgataattcaggttggttgtgatcactctgtcaagccagcctttctcgtaatattcatcaaatttatccagaccgtctgtgaacagaccgtaggtagtgcatacaaatactctctttgcgttgcgttcctttaactgtttggcaacatccagcatacttccgccggaggaaatcatgtcatcgataactacaacatctttgccttctacggaatctccgaggaattcatgtgcaacaataggattctttccattgacgattgtagagtaatcacgacgtttgtagaacatacccatatctactccaaggatgttggagaaatatacagctcttgacatggcaccttcatcagggctgatgatcatcagatggtcattgtcaacacgaagatccggcacactcttgatcagagcttttaaaaactgataagtagggaaaaagttatcaaaaccattcagcggaatagagttctggacacgtggatcatgggcatcaaaggtaatgatattggaaactcccatatcgcttaattccttcagtgccagtgcacagtccagagattctcttttagtacgtctgtgctggcggccttcataaaggaacggcataattacattgatacggtgtgccttgcctgttgcagcggaaataattcgtttaagatcctggaaatggttgtcaggagacatatggttctcgtgtccgcatacagtataagattcgctgtaattggtcacatcaaccataatataaaggtcagtgccacgaacggattctttaatataacctttaccttcaccggttccgaaacgggggcattcacattctacaataaatgattcttcgctgtatccctgaggaataacactaagctgtttgcgttcaaccagctctttacggaatttaacaagttttctgtcaacttcttctgcaagttctctgcatccaagagctgcaatacggataggtgcaaccggcatggatttttccaacaattctatgtttggcataatactcctcctaagtagtgattttatactcaaaaaatagatttcaatataatatataacatttgccctaaaatacgtcaaggaatttattgattttttcttttacaattgttatgatataaaagatagcggattctgggcgcaggtatattttgtccggaattactgtcatatgatatcaggagtaaatgtcagaaagtaactgtgcctgcacagtaaataaatcagcggctcctgaatgatcgagaaacaaaatgtgccggaaaagtttatcccacacacaatttccggttacattccaatggagtaaaattcatgaaaaaaaatttacacataatatccagggttcttccggacagtatcggagaagaactggaactggaaccgggagatgcgctgctttccattaacggccagccggtagaggatgtgtttgattatcgttatctgatgaatgacgaatttgttacgctccttatccgaaagaagaatggcgaggaatgggaactggaagtagaaaaggaatatgaagatgatcttggcgtggagtttgagaacagtcttatggatgagtaccgctcctgttccaatcactgtattttctgttttatagaccagatgccgcccggtatgagagaaactttatattttaaagatgacgattccagactgtcattcctgcagggaaactatgttacccttaccaatatgagtgactatgatctggatcgtattatcaagtttcatctttccccgatcaatgtatcgtttcagactatgaatcctaagcttcgctgtaaaatgctccataatcgatttgccggagatgcccttgcaaaagttgacaggctttataaaggtgatgtgaccatgaacgggcagattgtgctctgcaaggggattaatgacagggatgaactggaatacagtctggaaaaactgtcggaatatgcgcctgtactgcagagtgtttcaatcgtacctgtaggcctttccaggtatcgaaaaggtctgtatccactggaatcttttgataaagaggatgcaaggtatctgatcagtcaagtagagcggtggcagaagatcatggtgaagaagcatggtattcattttgtacatgcttcggatgaatggtatattcttgcaggatatgaacttcctgaggagggcagatatgacggataccttcagctggagaatggtgttggtatgatgcgtctgcttgaaacagaggtaaaagagagacttgagcagcttgaaggcgatgacagagaggtaaatgccactgttgcaacaggacggctggcagcgccttatataggtaaaatgataaaactggtacagaagaaatttccgaatgtccaggctgaagtatatgcagtaaagaataatttctttggagagaagatcacagtttccggtctgatcacagctactgatcttatggatcagcttgcacagagaaatctgggagaaaaagtactgatcccatgcaatatgctcagaagcggcgaggatgtttttctggatgacctgacggtggaagatgtcagacaggctcttaagacggaaattgtagtggtagatgaaccgggtgctgacctggtaaactgtctgatcgaagcaccagaccataaaaagataagaaggagacagatatatgagcaaaccggtagtagcgatagtgggcaggcctaatgtaggtaaatccacattgtttaatgcgctggcaggtgagaagatttctattgtaaaagatacacccggcgttacaagagacagaatttatgcagatgtgacatggctggacaagacatttaccatgatcgatacaggcggtattgagccggacagcagtgacatcatcctttctcagatgagagagcaggcacagattgccattgatacggcagatgttatcatctttatcacagacgttcatcagggactggtggattccgatgcgaaggtggcagatatgctccgacgcagcggcaaaccggttgtccttgttgtgaataaggtagacagtatccagaaatttatgatggatgtttatgagttctataaccttggtatcggtgaaccgattccgatttctgcggcaaaccgtatggggttgggtgatatgctggatgaagtggcaaaacatttccctgaggatgcagatacagaagaagatgatgaaatcccgagaattgccattgtgggaaaaccaaacgtaggaaaatcgtcactggtaaacaaacttctgggagaagaccgtgtgattgtttctgatattgccggaactacaagagatgcggtagataccagagtaaaatggcagggaaaggattatatctttattgatactgccggacttcgccgtaagggaaaagttaaagaggagattgagagatacagtgtgatccgtacagtgactgcagtagaacgtgcagatattgtcattgtaatgattgatgcatcagagggtgttacagaacaggatgccaagatcgcagggattgcccacgaaagaggaaagggtgttatcattgcagtaaataagtgggatgccattgaaaagaatgataagactatttataagcacacaaacagaatccgcgaggttctggcatatatgccatatgcggagctggtatttatttctgcaaaaacaggactcaggatttccagaatgtttgaaacgatcgatgcggttatcgaaaaccagacactgcgaatccagacaggtgtcctgaatgaaatcctttctgaggcagtggcaatgcagcagcctccgtctgacaagggaaaacgtttgaagatttactatatgacgcaggtggctgtcaaaccgcctacatttgttatctttgtaaatgacaaagaactgatgcatttctcttataccagatatctggagaacaagatcagggatgcctttggatttgcgggaacatcactgaaattcattattcgtgaacgaggtgaaaaagaataatcatggaacgcctgatttgtattgcaattggatatgcatgcggactttttcagaccgcatacattttaggaaagatttatcatattgatatacgcaaacagggaagcggaaatctgggttctacaaatgtactgcgtacacttggcaaaaaggccggggcattgaatctgttgtgtgactgtctgaagtgtattgcggccatcctgatcgtaagggcaatattcggaaattcttatggagatattctgccgctgctgagcctttatgcagcagctgggtgtattctggggcataattttccgttttatcttaattttaagggcgggaagggcgtagctgcatctgtaggacttgtgattgcttttgactggcggatttttgtgatctgtgcaattgtatttttcggactgtttttcctgacacactatgtttctctgtgttcggtaagtgcatatctggctgcatttatcagtatgatcgtatttggacagatggggtcttatcatatggattcttatcatatgatcgagctttatattgttatgggactcttgacagtactggcattttacagacataaaaagaacataaaacggcttcttgacgggacagaaagtaaaatttatttaagcaaaaaaaataaataaaaagaggtatttatatggcaaagataagtgtgcttggtgcgggaagctggggaactgccctgtctatccttctttacaataatggacacgaggtgattctctggtcggcgcttggggaggagataacaacattaagagaaaagcgggaacacgtgagcaaacttccgggagtaaagattcctgaaccgattgatatcacaatagatcttgagagaagcctgcgggatacagatgtggcaattctggcagttccttcgccttataccagaagtacctgcaagcgtatggcgccttttgtaaaaaacggacagaaaattgtaaatgttgccaaaggtgtggaggaaaaaactcttcttactttaagcgagatcattgaacaggaacttccacaggcaaatgtgtctgtgctttccggaccaagccatgcagaagaggttggaaaaggacttccgactacctgtgtggtaagttctcaccagagagagacagcagaatatctgcagggaatctttatgagccctgttttcagagtttataccacgccggatatgctgggagtggagcttggcgcagcgttaaagaatgtgatcgcactggcggccggaaccgcagatggtctgggatacggcgataataccaaagcagccctgatcacaagaggaattgcagaaatttcacgtctgggtgttaaaatgggagcacgtatggaaaccttttatggtctgtccggaatcggagatctgatcgttacctgtgccagtgtccacagccgtaaccggaaagccggatatctgatgggaaaaggatataccatggagcaggcgatggctgaagtgaaaatgatcgtggaaggcgtctattccgcaaaagcagcaaaagaactggctgagaaatatgatgtggaaatgccgatcatcacagaaataaacaaagtcctgttcgaaggaaaaagtgcagcggaagcggtgatcgatcttatggtaagagataagaaagtggagacgccgatgcttccatgggaagacggacagaaaactaactgagatgttatagaaaaactgtaactgttcagtacctcgcgggatagctgactgctgaatggttacgaaaaactttcgaatgcatcatttacggaaaattctatagacagagatgataaatatgcaaaaagcagatgttatataaatacatctgctttttacatttgaatgataaaatattttttaactactctttatcagaatgcaatgtcccttaaatcctcgggaatatgtgaactgtggaaattttcgttcagagtatcgatcagatccatatcctcctgttcgattgtgaaatcaaaaatattgccgttacttctgatgcggtcaggatgtacggatttcgggattactgatattcccttctgggtagcccagcgcaggccaatctgagcgggagtatgggcatatttggttccgagtacacacataacatcattatcaagatatgcacctcttgcaagcggggcatatgcctgtacctggattcctttattctggcaataatcaatcagctctttcggatagcagagaggatggcattcaatctgatttacagcaggtatgattccggaattggcttccagttcttccagatgacggatttcaaaattactgacaccaatagaaagagcccgcccggatttctggatttcctccagtactttccaggtgctgagataacatcccggaaccggccagtggatcagatacaaatccacataatccagtttgagccggtccaggcttctttcaaaagcaccctgaatgtctcccagacgctgtgcggtattccatacttttgtagtaataaaaagttcatttcgcggtattccacagctggcgattccccgtcctacattttcttcgtttttatatacggaggctgtatcaatcagacggtatcctgattcaacagcagaaataatagcattttcggcctcattttccccggtggctttgtatactcccagtccgagtaaaggcatctctctgtttgtattcagaaaaacagtattatccaaaacaattcctccaattcctatatacactttgggcaagctgctttgcccgataatcttgtccaagtataacataaaaatgtgtcagaagtacataaaaattattaagtttttgcaagaacacattgttaacaatataacataagggttaaagtattaacagttcttgtgaaaaaagctatttcaaagcatatatttcaaaatttttttagtgattatttatgctaaatggcttgcggaaacgaaaaaaaagatgtataatatcagtaaattgataatttattgtcataaaaaaagactgaattttataaattcagtgtatttttcaatagaagggagcatttaaccatgcatttaatcaaagatgaaaatgggaatcttgtccagcacggacatgggcacactcatgaacatacccatgaagatggtatgactcatactcatgagcatactcatggcgaaggtcatgatcatggacattctcatacagatcatgcctgtgatactgctcattgcggatcctgcagtgaaggtgactgtaagaatgagacactggctcttctgacatatatgcttcagcacaatgagcatcatgctcaggaactggatcagatggctgataaccttgccaagatgggaatggatgcagcatgtaagactattaaggaagctgttgcagattttcagaaaggcaatatgagacttggacttgccttaacacttgttaaagaagagatgaaataggaggcgacatcacatgtgtctggcaactgtatataaagaaagtgacgattctgttatttttaaaaatgtttcccgtatagatgtggatgggaataaattgattctccgtgatattatgggagatgagagagtggtcgagggaactattttaatggttgaccttgccaacagtattgtgaaactgaaatgtgactgatattaagatagggacaaaacaccttttgaccttaacatcattttttatttatagaaagaatactaagacagatttaggaggcacctggttttatggcacacgtaattgctgtcgcaggaaaaggcggcgtgggaaaaacaacattatgcggaatgctgatccagtacctgtgtgaaaagggtaaagggccgattcttgcagtagatgctgatgcaaactcaaacctcaatgaggttcttggcgtaaaggtagagacaactcttggcgatgtgcgcgaagaaattgcacgtgcagagcttgcaaaagagaatccaattcctaccggaatgtctaaggctgattacgcggaaatgcgttttgaagatgcgcttgtagaagatgatgattttgatcttcttgtcatgggcagaactcagggaaaaggctgttactgttatgttaatggtcttcttcagactcagcttgcaaaataccagaataattatccgtatattgttgtagataatgaagccggaatggaacatatcagcagaggtgttcttccgagcatgcagactgccattctggtcagcgactgctccagaagaggcgtacaggcagtaggcaggattgcagaactcattaaagaatgtgatatgcatcctgatacagtcggtctgatcattaaccgagctccgaaaggagaattgaataagggaattcaggaagagattgcaaatcagggactgacacttcttggtgttgttccacaggatgaaacagtttatgaatatgactgtgagggacgtcctacaagcacacttccggaagacaaccctgtcaagactgcacttcgtgcaatcgttgataatttaaaattataagatacaccccttgtcggatgagaatccgatgagggatgtttgtgcgcataggaaatctatatatgcagagataaatacaagtttacatctttattttttaagttaaataacccatgggaggggatgggatgggttatcacagttatctttaacggagccaattcttcagatatagataaccgggatttcctgcctgtgggattattaataaaataaaaatgtgtatcttaaaggaatacacaaaccagaattaaaggaggtctataatgagtgaattcaaattaactacagtggaagagtttgaagaggctactgccagacttttggagacaggtgcaaaggttggagctgacgcatggcagttccgtgtaaaaaaccagactccacattgtaaattcggtgagcagggtgtctgctgtcgtatctgtgctatgggaccatgtcgtattacccctaaagcgccaagaggtatctgtggatgtgacgtccatggtatcgtaggaagaaacttcctgaaatttacagcaggtggtgcagctactcactctgatcacggtcgtgaaatctgccacacattatattgtgcaaaagacggcggaaactatcaggtaaaagatcctgagaaactgatccgtatcgcaaaagaatggggcgtagagacagaaggaaaagatatctatgatctggctcatgaaatggctgagacaggattgatggaatatggtaaaccatttggatatcagagattccttgacagaatgcctgcaggacagaaagagaaactgattgaaaatgaaattgcaccacgtgcgatcgaccgtgaagtttccacttctttacatatggctcatatgggatgttcttctcttccggaagctcttgtaaaacagtctatccgctgcggtatggctgatggatggggcggttccatgatgggaacagagttctctgatgttttattcggaactccgaagccaattgacacggaagctaaccttggtgtaatggttgaagagaatgtaaacatcgttgtacacggacatgatccgagtctttccgagatgatttgtgaatatgcagacagcaaagaaatgatcgattatgcaaaatctgtaggagcaaaaggaatcactgtttccggtgtatgctgtacttcaaacgaagtagctatgcgtcgcggtgttccgatggccggtaacttcctgcagcaggagaatgtagtactgacaggtgcctgcgaagcaatcgtagtagacgttcagtgtatcttccctgcattaggacctttaagcaaatgcttccatactaaatttatcacaacttctccgatcgctcagatgcctgatgctgaatttatcagattcaatgctgagacagcaggagagaatgcaaaagcaatcgttaagatggctattgataacttcaagaacagaaaacctgaacttgtacatatcccacagctgaaacagaaagctacagttggttattccgtagaagcaatcgttaaggttcttgacggtgttacaaactctcaggttgatgagacaggaacaacaaaaccattacttgagtgcatcacttccggtgttatccgtggtgctgttgctatggttggatgtaacaatcctaagatccgtcctgactatgcacatattgaactgatgaagaaatgtatcgctaatgatatcgttgtcattgcttccggatgttctgcacaggcagctgcaaaagcaggtcttatggacaaatctgcaaaagatctttgcggtgcaggtctgaaacgtgtctgtgaactggctgatatcccaccggtactccacatgggatcatgcgtagatatttcccgtatgatgatccttgctgctgaacttgcaaaagatgcaggtcttcagattaatcagcttcctgtagttggatgtgctcctgagtggatgtctgaaaaagctgtatccatcggtaactatgtagtaggtaccggtattgatacattccttggtgttgatccatatgtttccggttcttcagaaatgggagagcttcttacagagggaacaagaaaatggacaggagctgcttatacagtagaaacagatattgagaaattagttgatctgatgatcgaaagaatcgaagagaagagaacagcattaggaatctaatctgctgtgatcttaaaaatgtaataaaaggtggatgacgtaaaatgaaaatagcagttacaggaaaaggcggcgtaggcaaaactacttttgcagcaacgctggccaggttgtatgcagcagagggaagaccggtacttgcagcagatgtggatccggatgcgaatcttggtcttgcattaggctttgatgaagaaacactggattctattgtaccaatttccaaaatgcgtaagcttgtggaagaacgtacaggtgcgactgcgggaaatcagttctatcatctgaatccgaaagtagacgatatcccggagaaatatggtaaggtctgtaatggcgtgcgtctccttgtcctgggaactgtcgagacaggcggtggcggatgtgtatgtccggagcatgtaatgctgaaacgtattattaacaatctggtactgagaagagaagatgtagtaattcttgatatggaagccggcctggaacatctcggcagaggaaccacagaaggagttgacgcatttgtcgtagtgatcgaaccgggtgcaagaagcgttcagacatacaagaatgtgaagcgtctggcaaaggatctgggagtatctcaggtaaaggttgttgcaaacaaagtacgcaacgaggatgacgaaaactttatcagagagcggattccacaggaagatcttttaggaatgatccattacaacacagaggtaattgatgcggacagacagggcaagtccccttatgatttcagcaaaacagttactgatgagatcattaagataaaagaaaaaatagatcgtcaataatctcatatattaggaggtaaacaaaagtgactttatttgaaagtgttttcgcgggaaacgatgcggtttatggactgacagagggtgccattaaccaggcaattgaaaaatacggcgctgacaaagcagtcagcttccctgatacagcatattctttaccatgctactatgcagtaacaggaacaaaggttggaactcttgcagagttaaaagatgctcttgcagtagtaaaaactcttatgacaagagagaagagaacaaatgacgtatttatgtcaggtgttgctacagctctctgcgcagaatttatcgaagttctgaaatatatcgatggagcagttccttacgaagctccttgctacggacatcttgcagatgcagtgatccgtgaacttggtgtaccgcttgtaacaggcgatatccctggtgtagcagttatccttggaaaagctccttccgctcaggaagcagcagaccttgttaaatcctatcagtctcagggtatcctgatcactctggttggtgacgttattgaccagttagaggaagttggatacaagacaggtgctaacgtacgtgttatcccgcttggaaaagacgttacagcagttatccatgtagtatctgtagcacttcgtgcagctcttatcttcggtaacgtaaaaccaggtgatgctgcaactctgatggattacacaatgaaacgtgtacctgcatttgttaatgcatttgcaccgttaaatgatgtgatcgtagcttgtggtgcaggcgctatcgctcttggattcccggttatcacaaaccaggaagatgttgcaagagtaccgaagagcctgatctgccagaaagacatctccaaatggaatgcaacttctctggaagcacgtgacatcaaaatcaaaattacaaacatcgatatcccggttgctttcgcatctgcattcgaaggtgagattatccgtcgtaaagacatgcaggttgaattcgatggttcccgtgtagactgtgcagagcttgtacatacatgtgatgcaagtgaagtagaagaccataagattacagttgttggtccggaagtagacgacatggaacttggcagcaagaacagcattgcatatgttgttaaagttgcaggtaaaaacatgcagcctgactttgaacctgttatcgagcgtaagttccataactacatcaactgtatcgaaggtgtataccatacaggacagagagatatgcagagaatccgtatcagcaaagatgcatttgctgcaggcttcaagatcaaacatatcggtgaagttctctatacacaggttaagaatgaatttgacgcagttgttgataaatgtgaagttactatttatacagatcctgctgagtgtacaagaatccgtcatgaagttgctatcccgatcttcgagaaacgtgatgaccgtctgaatactctgacagacgaatctgtagatgtatattacagctgtatcctctgccaggcattctccccgtctcacgtatgtgttgttacacctgagagacttggactttgcggtgccgtttcatggctggatgcaaaagctacccacgagctggatccaaacggaccttgccaggtaattacaaaagaaagacctattgatgagaaccttggttcttatgaagatgtagatgaagctgttaagaaattatcccagggtgcattagagcacgttacactgtactctatcatgcaggatcctatgacatcatgcggatgcttcgagtgtatctgcggtatcgagccattctccaatggtgttgttatcgctaaccgtgagtatgcaggcatgacacctcttggaatgacattctcagaaatggcatccatgacaggtggtggtgttcagacacctggtttcatgggacatggtaaacatttcatcagctccaagaagttcatgaaggcagaaggcggtattgaacgtatcgtatggatgccaaaagaactgaaagagtttgttgctgagcgtcttaacaacacagcaaaagaactctacggaattgaaaactttacagatatgatcggtgatgaaacaatcgctactgatccggaaacactggttggattccttacagaaaaaggccatccggcattagcccttgatccgatgatgtaaagatggtggttttcccggaggtattatgtgagtcatgcggaggcttttaataagcctccgggtttaaacgctcaaaagcgtatagataaaaaccatagtatattatatttcaaggacatacagaatgtgatcgtgtgaaagtacaatcgttctgtttcgtaaggacggaatgtggctgccgtaatgatttgctgataaaaatatatgcggagtgtatgaagaatcagcaaagtttagatatggcaatttgccgaatttttttcactttgttatggaaaataaaggaaagctgtgaaattgttgtttttttaacaaaatatgacagactgtacttgtcaacgggcaggataatgttgtatactacacatgacatagtgtgtaagtctgcgaaaagatacatacacatagtaatttttttaaggaggccaaaaaaatgccgtttaatcagaaacttcagaaattcaatgcaaagattaatacagtcaccattggcagcggagataagactgtaacaatcggcggagactctacttatccattttattcttttgatgcaccatcagaaaacacacctaagatcggtgtggagatctctgatatgggtcttgagaatgttgtatccgaaggtatcaaagcatactacgacggagcttccacaatcggagaaatggctaaaaaagcagcagctatggaaggtgctgattttgtagcgcttatccttgaaggcggagatccgaacggtgtaaacaaatctgttgatgaacttattgcagttgtaaaagacgttgcagattccattgatgcaccattagtagtagaaggatgcaagaacgtagaaaaagacgctgaacttcttccgaaagtagctgaagctcttcagggaagaaatgtattgatcctttctgaaaaagaagaaaactacaaagcaatcggtgctgcagcaggacttgcttacgatcagatcgtaggtgcagaatctgccgtagatatcaaccttgctaaacagcttaacgttgtaactactcagttaggcgttaacgcacagaagatcgttatgaatatcggcagtgctgctgccggatatggatatgagtacgttgtatctacaatggatcgtatcaaaggtgcagctttatctcagaatgataacatgctgcagatgcctatcattacaccggtatccgctgagacatggggcgtaaaggaagctacagcttctgaagctgacatgcctgaatggggaccggaagaagagcgtggaatcgatatggaagttatgacagctgctgctgaccttgcagccggatctgatgcagtcatcttaagacatccggaagctgttgcaactatttccagaatgatcaaagcacttgcgtaattgaataggaggaacaaataaaatggcactgaatggtattcagatctttaaattaacaccaaagaaaaactgtaaggaatgcggatgcccaacatgtatggctttctctatgaaagttgctcagggcgctatgaaaatcgaacaatgtccgcatatgtctgatgaagctttagcatctctttccgaggcaactgctccgccaatgaagacaatcaaaattggtactggtgcagaagagcacactctgggtggagaaacagtattattcagacatgaaaaaacatttgtaagcaagccaagatatgcagtagctctgtgcacatgtatggatgatgctacagtagaggcgaaacttgcagaaatcccgaaggtagattatgaccgtatcggtgaaagaatgtatgctgaacttgtatatgtaaactgtggcgaaggtgcagatgcagctaaatatactgcacttgtagaaaaagctgcaggtcttggcagaactttagttcttgaatgtaaagatcctgaaatcgcaaaagcagctcttgcagtatgcaaagacagcaaaccggtcttaaacggtgcagatgcttccaactatgaagcaatgaacgcagttgctacagaagcaggtgttgttctcggtgtatccggtaaagacttaaatgaattatatgatacaacagcagctcttgaaaaactcggaaacaagaaccttgttcttgatacaacaggcgctgacatcaaagaaacctttgcaaacactgtacaggttcgtcgtgcagctctgaaagatcaggacagaacatttggttatccatctatcgtaaaccttgttaagatcgcaaaaggtgaccttcacttacaggcagctttagcatctatgtttacaatgaaatatggttccatcatcgttatggagcagatgacatatgcagaagctcttccattatatggtctgcgtcagaacgttttcactgatccgcagaaaccaatgaaagttgagccaggcatctatccattaaatggtgctgatgagaatgcagtagtagttactactgtagacttcgctcttacatatttcgtagtatccggcgagctggagcgttccggtgttccgcttaacctggtaatcaatgatgcaggcggactttccgtactgacatcctgggcagctggtaaattctccggcaacagcatttccgcttacatcaaagaaaatgttgagcctaaggtaaaatccagaaagcttattatcccaggtaaggtagcagttcttaagggtgaccttgaagcaaaacttcctggatgggaaatcatcgttggaccaagagaagctgtacagcttgttaaattcttaaaagatatgcaggctgacggtcagatctgatcggaatgacatgccggaccggtcatctgaccggtctggctcttaataagaagcatacaggttttattcctgtgtaaataaataaaaaggagaacacggttatggcaaaatttgtaacaatcggagaaagactttccactactgcacctgcagtaaacaaagcatttacagaaagagatccagagccgatcatcaaaagagcaaaacagcagcttgacgctggtgctacttaccttgatgtaaacatcggacctgctgagaacgatggagaagatctgatgaaatgggcagtacagctccttcagtcagagtttgacaatgttccgcttgcactggatacaacaaacaagaaagctattgaagctggtatctctgtatataacagagcaaaaggaaaaccgatcgttaactctgctgatgctggtgacagaatcacaaacatcgaccttgcagcagcaaacgatgccatctgtatcgcactttgctcttccggtatggtagcagcagacaatgatgaacgtatgatgcactgccagaacatgcttgaaagaggtatgtctcttggtatggaagctgaagatctgtggtttgacccgttattcctggttgtaaaaggaatgcaggacaaacagatggaagttcttgaagcaatcaaaatgttctctgatatgggactgaactccacaggtggtctttccaataacagtaacggtatgccgaaacatatccgtccgatcatggactctgctcttgtagcaatggctatgatgaacggtcttacatctgcaatcgttaatcctaacgaccttcgtctgatggaaactattaaatcctgtgatgtattcaaaggcaatacactgtatgcagattcctacctggaaatctaatcagtatagctgagaaatctaataaaatattcgaccgacataaatgaatacataattatgggggctgaaggcttcggtcttcggtccctgttttattacaggctattacgactatgagaaaggtggttgccgaatgtttaaggtaacattttcattcgaagatggcagtatggtagaaacttttgccaatgcgggggataatttactggaggttgcacgaagtgccaatgtggctattgatgcaccatgttccggaaacggagcctgcggaaaatgtcgtgtccagttaaagagcggagaactggaaagcaaaaagacattacatatttctgacgaagaatatcaggcgggatggcgtctgtcttgctgcagcaagatcagtgcggacgtcaatgtgctggtacctgatattgcatctgcctataagagcagaatgaaagtagctgatttaagttcgaaagaggaaatagccatttttgaaaatgccaagagtgatatacagctggcaggcattgaactgaaaaatagtctggaggttgtggatgtgctgatggacgttccctctctggatgatactatgccggacaatgagagactgacacgtgcattgcggaaatatttaaatatcaacagagtacggataccatatgtagtcctgaaaaaactccctgatgtactgagagagaacaattttgcagtgaaatgtgtgatccgcgctacttctgacgatatgtatgtctatgatatatttggcaaagacgaggatgtggtcatcggaggtctggcaattgatatcggtacaactacagtttctgctgtactgattaatatggaaaatggagaaattctggcaaaaagttctgccggaaacggacagatccgttttggtgcagatgtaataaaccgaatcgtggaatcacagaaacccggaggtcagaaaaaattgcaggatgcggtgatcaaggagactatcaatccaatgatccacgaaatgtgcaagagtgcaaaatttcccaaagaccatatctacaggatgtgtgtggcatccaatacaactatgaatcatctgtttgcaggaatcaatgcggatccgttgcgtacagagccttatatccctgcattctttaagaccaattccctttttgcttccgatgtgggagttgatatcaataaagatgctcatattattatggcgccgaatatcggaagctatgtaggcggcgatatcacagccggaactctggtcagccagatttggaacaggcccgaattctcactgtttatcgaccttggtacaaatggagagcttgtatttggaaactcagactttatgatgagctgtgcatgttcagcaggtcctgcctttgagggtggtgacatcagctgtggtatgcgtgccacagacggagccatcgaagcatgtaccattgacaaagagactatggagcctacctacaagatcgtaggtgatccgggaacgaaacctgtaggtttatgtggatccggtatcatcgatgtgatcagtgaactttatatctgcggaatcatcaaccccaagggtaaatttatccgtgaaggaaagagaatcaaacatgacaaatacggtatgggcagctatatccttgcatttgaggaagaggcaggttctgtaaaggatgttgagattacagaagttgatattgacaacttcatccgtgccaaaggtgccatcttctcagcaatccgtacaatgcttacttctctggacttcgatgtgagcatgatcgatgatgtgtatgttgcaggcggtatcggaagcggtatcaacatgcagaatgcagtcaacatcggtatgttcccggatatcccgatcgagaaattccactacattggtaactcttctctgacaggtgcgtatctgatgcttctgtcaacaccggcagagaagaagacttatgaacttgctgcaaatatgacatatatggaactttctacagtaccgatctatatggatgaatttgtaggtgcatgttttattcctcatacagatacaagtatgttcccgactgtaatggaagaggttcagaaccgctgatgaatttcagtaatttctatatgagaaattatgaatatctagagaaataaaataacaggacagatctttggatccctttgatctgtcttgtttatggagatttatatggcatttagtttaaatgacttaaattatgaaaaagacagtaaggaaagaatgccgtgggagcattacactcaggagtttgcagctgcagacccgaaggagatcgcttccagattgtctattccttacgatgaagaaacccaaaaactgactttaacttttcttggaacacagtatcagattacatggccggattttgaagtaacacatactccggatgataaaggtttttatccactggagaacatgatctatgcaaggatcctgacgattcgttttcttttaaacggtgtgaagtctgagagttccggaaaatttaagacataccgggagatgccatggggagaagtatatttaagacagtttgacggcagatgtatcaaacgtctggcattttcctatggtaaccgtccgggagatttcagggcgatcatggagcatatcagtgccatacctgtaaagcatggagatattgcctatgaagtagaaatttttccggaatataaaatacagatgatcctctgggagggcgatgaggaatttccgccgtcttcacagattctcttttctgacaacttccctgtttctttccaggcagaggatatggcagttatgggagatgtgattattggttctctgaaagcatacctgaaatgcgttcagaaatgacaaatgatatcaggattatagagattgcagaataatctgcggatatcagagtcagataagtaaatataaacagaaagaaagagggagaaaaaatgggattttcaacaagtacatgtacagaattcgttgaagttctggcatctaaggctccggttccgggcggcggcggtgcgtctgcattagttggtgcagtaggaactgctcttggaaatatggtaggaagccttactgtaggaaaaaagaaatatgcggatgttgaagacgaaatgtacgaattaaaagcaaaatgcgatcagttacagaaggatttcctccgtctgatcgagcgtgatgcagaagtattcgagccattatcaaaggcatatggaatgccaaaggaaacagaagaagagaaagctgagaaagccagagtcatggagatcgtattaaaagatgcctgctctgtaccaatggagatcatggagaaatgctgtgaagcaattgaactgatcgtagaattcggtgcaaaaggctctaagcttgccatcagtgatgcaggcgttggtgcagctttctgtaaagcagcattacagggtgccagcctgaacgtatacatcaacacaaaatccatggctgacagagagtatgcagaagaattaaacagaaaagcagatgccatgcttgagaaatatacaaagatcgcagatgacacattcaacagcgtacttggcagactgaaataatagtaaataaaatagaaatttctgtattgttttccgtctcttttaataaagtgtaacattatttattgagatgtatttttttacagagtgcatatgatttatgaggcggttatgctgaaatcattcagatacagtatagaataataacgtataatttcggagggaacgacaaatggctaagcagttattaggtaaagaagtaacagcagcattaaacgagaaaatcaaagcaaacgtagcagagcttcagggaaaaggagtaaatcctaccctctgcatcatccgtgttggtgaaaacccaagcgatatctcctatgaaagaggagcaacaaaacgctgtgaaactttaggcgttgcatgtgagaaaattttacttccggaagatgtttcccaggaagaacttcttgcaacaatcgataaagtaaacaaagatgacagcattcacggcgtattattattccgtccgcttccaaaacatctggatcaggcagtgatcgagaatgcacttgctcctgaaaaagacgttgactgtatgacagacctttccatgtccggtgtattcacaggcaagaagattggtttcccgccatgtacaccacaggcttgtatggaaatccttgatcattacggaatcgactgcacaggcaaaaaggcagtagtaatcggaagaagccttgttgttggtaaacctgcagcaatgatgctggttaaaaagaacgcaactgttacgatctgccacacaagaactgtagatatgccgtctgtagcacgtgaagcagatatcattattgtagcagcaggccgcgccggtgttgttggtgccgaatatgtaaaagaaggccagacaatcatcgatgtaggtatcaacgtaaatgcagaaggcaaactctgcggtgatgttgattacgcagcagtagagcctatcgtagatgctattacacctgtacctggcggtgttggaagtgtaacaacttctgtactggttggtcatgtggtagaagctgcaatgagaaaggtaaacgcataagatgaaaaaagtgccgggaaaatatttctggctgcttatgacaataacaggtgccctgatgttcggggcacctgctttggtaagtgccagtgaagggatagcgtccactgatacagaaaacagcgcagcagacaatgctgcagataccccagatgacgacacgatagctaaaacaactgatagtgcagaaaaaaacagtcaggaaactgatcattcaggagagggacagatctccaaacctaaatatctcgaaaatgcagaaaataacggagaagaaattatctccgatgaagacccgacagataatacttatggatactacacgattatgggtggaacaactgtttccgtcgatgaaatgtgttcattatacaacagtcagggatgcacttacccatctgaagaactcagtggcggcggagcatctgatatagataccttttgcaatattattgtagaggaggcaaatgccgagaatgtacgtggtgaagtagtttttgcgcaggcaatgctggaaaccggatggctgagtttcggtggtgatgcgggaatcgaccagttcaatttcgcaggtcttggaacaaccggaggtggagtcaaaggaatcgcatttccggatgtaagaacaggaatacgtgctcaggttcagcatctcaaagcctacgcctccacagattccctgaatcaggaatgtgtagatgaacgcttcgattacgtgacaagagagacggcgccttacgtggaatggctgggaatccaggaaaatccttatggcggcggctgggcagcaggaaaagattatggaagtaaattaagaaaaatactggcagatttgaaatcagggacataaagacagagttttgcgccttatttgtattatttttctgaactgctgtaaatgatttttaaattcttaaataaagaaaggatgttgagtaaaatgaaaagaaaattgatgatttgtgcaatggctttgtgtatctgtgcaggattgaccggtaacactggagaggtcagcgtatgggcatccgaaggatcatcttcggatgctgtccggataggcgctctgaaaggtccgacagcaatgggaatggcgcagcttcttgatgaagacggatacgattttacgattgctgcatctccggatgagattgttccgatggtagtacaggacaagcttgatattgcagctgttccggcaaatctggcagcaacgttgtatcagaagacagataaggatgtcagtgttctggcggtcaatacgttgggtgttctctatcttgtggagaatggagacagtgtaaaatctgtggaggatcttaagggaaagactatttatgccagtgggaagggtgcaactccggaatatgccctgaactctgttcttaaagcgaatggaatcgaccctgaaaaagatgtgactgttgaatttaaatctgagcacgcagaggtagtttccgcacttgtgcaggatcagacagcagtcggacttcttccgcagccttttgtaactacagcgctgatgaaaaacgataagctgaaggttgccctggatctgaacaaactgtgggaagattccatggatgacggaagtaaacttgtgacaggagttgtgatcgcaaacaatgagtttgttcaggatcatgcagataaagtaaatgattttatggatgcttataaagaatctgtagattttgtcaacagtgacacagaagttgcggcccagatcataggagatcatgatattattgcaaaagaagttgcacagaaagcaatccctgactgcagtattgtgtttattgaaggtgatgagatgaaaaccatgctttcaggatatctggcaactctggatgatcagaatcctgagattataggaggacagttgccggatgatgcattctattacacacgatagagcaaaaactgacaatggaacgaaatatacaggaattcgcatattagcagtgtttttctggatcgcaatctggcagtttgcgagtatgtatctgaaacaggagatccttctggcatctcctgtttctgttgtccgaaagctttttgaactgattttcagcggaaatttctggcagtctgtcggatttagttttgtacgcattgtgacaggatttcttctggctgtgtttctgggaatctttctggcagtgttggcatattggtcaaaaacagtggaaatcctgacggcacctgtgatcgcagtggtcaaatctacacctgtggcatcttttattattttgtgcctgatatggattccttcgaaaaatctgtcagtttttatttcctttcttatggttctgccggtgatatatacaaatatccttgagggaatacgacagacggacaggaagatactggaaatggcaaaagtatttcgtgtgaatctcagaagacagatcaggtatatttatgtatcgcaggtactgccttattttctctcagcatgcaggctttctcttggaatgtgctggaaggcaggagtggcagcagaggttatcggagtaccttcaggttctattggtgagaaactgtataatgcaaaaatatatctgaatactccggatctttttgcgtggacaattgtgataattgtgatcagttttgtatttgaaaagtgttttcttggaattgtaagcagagtagtttatatgatagaacatagataacggaaattttgatttatgataatcctcttaaatgcattatttatgaggtctgttacaggcggagaagagatatggatataaaggtagatcatattagtaaagcatacggagaacagcaggtactgcaagacttgtcctgtgtttttccggaagggaaaaccacttgtatcagaggaagatccggatgtggcaaaacaacactgatacggcttcttctgagactggatgttccggataaggggaaaatagaaggggtaagtgacaggaaactcagtgcagtatttcaggaagatcgtctgtgtgaaaatctgagcgctgcttctaatataagactggtatgtacagaaacaataacagacagagaactggaggaggcgtataaagcagttgcgcttactgagatatggcagaaaccggttcgtgaactgagtggaggaatgcgcaggagagtatctatcctgagggcattgctggctgaatcagactgtgtgatcatggatgaacctctcagaggtcttgatgaaaaaaccagagcaaaaacaattgattatattttgaaaaagacggagggaaagacgttgatctttgttactcatgaagaaaaagaagcagtttggttaaaggctgacagaacagtagatatattgacaaagcattaaaattaatgaaaaactaaatttcggttatagattatagcgtgtctgaaaaatcatttctacaatcttcaaacacgctataactccaaaagaggaaaaacttatgattacattaaatgattatctgtattcaggagatacggttttaaaaattttacagaaatatacccgggatctgagaaaagaagcgaaacttactcataatgagattgatatgatgcatgtgaatttcctgattcagatcacagagcttttagaacacaatgatttccttacggcccagtcccagaagatccgggaattttataaatatatggctcatgaatatccgtttcttgcgtttacatttaaaggaaggatcaaatcgctgatccgggcagaagagaaatttaacggctatattgtggaatatatttacgattattatacaaaacatggaatctatcctcctgtgtcggaactgaaaaataaactcagttgttttcgggattttattgcatacagaattgtgttgtgtatgcccaagtgtcatctgaaaccaggagaagatcaggaaacggcgtcgatccgctatctttatgagattgccaatgttcttcccgggttcctggaagaacgagggtttacggtggagtctgcctatggagtaaagaaaagtacgtcgccgcttcttaatgaagatgtgaagatgtattaccgggattatatctgtggaaccagcggggaaggatatcagtcattacatatcacagtttatgataacagttcccgttctttcatggaggtgcagctacgtacccagaaaatggatgacactgcggaaattggtccggcgaatcatctgggatatgagaagaaacagcaggatgagcgtgcaagacgtgatgctattccagaaggcgagtgcgtttatttcgatgaagcctatgaacggggcatgcgtcttttgcagctggaactggcagatctggatgtaaatatgttttccgcagtagataacagtctgatcaatgatgggtgcggattgttcaggggaagactgatcttaccttatgaacatttgtcaagatttcagaatgatgtgatcgattgaataaaacacctatcttttgatgtataaaaatacagggaaatgacaaaaattgataaaatatgtaaatttttagttatattttaggcattctatggtacactggtatagtatatcaaaaatgggaggaaaactcgaaatgagcaaaaaagaaggaaaagggttaaagtcttttaacaagggatttcaagtgcctgacacctacattattatctttttagtagttgttgtcgcagcacttctgactttccttgtaccaaagggattttacgaaacacaggatatttcgtacatgatcaatggtgttgagaaaacccgtacagtaatcaaagacggaagtttccagtatctgacagacgatgcaggaaatgtagtaacagaaggagtagcactctttagtggagatggtggaacaggattcttcaactatatgtataacggaatcgtaaatagttctgcaatcgagattatcgcattccttatggtagtaggtggtgcattcggtatcatgatccgtacaggtgcgattgaatccggattgatcggattgatccgtaaggcaaagggagcagaaaaactgctgattccgatacttttcgtactgttttctcttggtggagcagtttttggaatgggagaagaagcacttccgtttactatgattctttgtccgttgtttgtagcagttggatatgattcagttatcgcagttcttgttacttatgttgcaacacagattggtttcggttcatcctggatgaatccattctctgtaggtattgcacagggtattgcaggtattgatgtattctccggagcaggattccgtatggtaatgtgggtagtatttacagttcttggctgtggaatgactatgttctatgcgtcaaagattaaaaagactccgacaatctcaatcgcatataagacagattcttatttccgtgagcaaaatgaaaaaacaggaattgacgaaggacattcatttggtcttggacacattttagttcttctgacactggctgctacagtagtatgggtagtttggggagttatgactcaaggatactacatgccagagattgctacacagttctttattatgggaattgtttccggtgtgatcggagttatctttaaactgaacgatatgaaactgaatgatatcgcaatatcattcaaagatggagcaaaagatctgattggtgctgcacttgttgttgctatggcacagggtatcatgcaggttcttggtggatcagatccgacaacacctacagttatcaatacaattatgtataatatttcaaatgcattgtctggagtttccggagcggttgcagcagtacttatgtatctgttccagtccgtattcaacttctttgttgtatccggaacagggcaggctgcgatcacaatgccgatcatggctccactgtcagacctgttaggtgtttcacgacagacagctgtagttgcattccagcttggtgatgcatttacaaacctgattgttcctacatctggatgtctgatcggatctcttgcaattgcaaagattgagtggtctaactggattaaattcatgtggaaattccttggcgtcttaatgattggtgcaatcattacagttcttattgcagttggaattggattctaaaacatacattgtataatttggagtgatttatgatgaaattaattcagaatattgatgtttatgctccacagcatctggggaaaaaagatgtacttacaatcaatgataagattgtcaagattaaagatgcaggttctatatccgcagagggatttctttctgaggcagaaatgatcaatggagagggtttacttttaactccgggattcattgatagtcatgttcatgtacttggaggcggtggcgaaggtggattcgccaatcgtactccggaagcaactatggaaggacttacgaagtttggagtaacaacagttgttggctgccttggaacagatggaatcggtcgtgatatgtgtgcactggttgcaaagacaaaaggattgaatgagcagggaatgtctgcatactgttatacaggcagttatcagattccggttcacacgttgactgacagtattgtgaaagatattatgatgattcaggaaatcattggaaccggagaaatcgcgatctctgatcatcggtcttcacagccgacttttgaggaatttgcacgtgtcgttgcggatacaagacttggtggtgttctttccgggaaagctggtattgtaaatgttcatcttggcgacagtccgagatgcttagatcttattgaacgagtggtagatgagacagagataccggcttctcaaatactgccaacacatatcaatcgaaatgagatgctttttggcaagtcgattgagtatgcgctgaaaggcggagcagtagactttacaggaaatgaagatattgactattgggaaactatctgtgatgaggtacgtgtatgtaatggtatcaaacggatgttggatgcaggagtaaatcctgaccgtatgacaatttcttctgatggacagggaagccttccgatgtacagtagtgatggcgaattccttggaatgggcgttggacagtccagctgccttctgaaggaagtaaaagaatgtgtatttaaaacagaaattcctttagaaatagctatttctacaattacatctaatccggcagatattcttcgcctcaaaggaaaaggtaaggttaaagaaggctatgatgcggatctttgtattcttgaccaggaacttcagcttgttgaagtaattgcaaaagggaatacagtttatacaaaataaagtatattgatgttaaaagcaccagtcattcagttggctggtgctttttgtaatattaaattcactttaataagcactttatgatataatgggctcgtagtcttttacagacataagaacgggtataaggagaatatagtattgattaatcagacagcgaagaagattttgaaagctctgtcttttgatggtgtggaagtagaagcatttcgtcatatggcggatttaaaacgattggatccgatgaagattttttataaaaaaatagatgagaaaatatataacgggagtcatgcagtcccgattcgtattttctttccaactgaaaaaagttttcgtgagagtgaagaaaagaaacataatattcaagataaaaagatgcttttgtttatacatggcggcggctgggttacagagagtatcgataattatgaaagaatttgtgcccggcttgctaatgcaaccggacaatatgtagttgcagttgaataccgactggcaccggaagataaattcccggtaggtctggaagattgttatgccgttgcgaaaacattatattccggagattttatgctcaacataaaacccgaaaatattacattgatcggagatagtgccggagggaatctttgtgcagcattatctttgatggctagagattgtggagaatttatgccaaaaagacagatactgatctatccggctacatataatgattatacagaaaattcaccatttccatctgttaaggaaaatggaacagattatcttttgacagctgggaagatgcaggattatattgatctttatgcgagaaataaagaggataagaagaatccttattttgcaccatacatagcagaagatttagcgaatcaacctgatacattgattcttacatgtgaatttgatccacttcgagatgaaggggaagcatatgggaagcgcttaaaagaggctggaaatcatgtggagatacatcggatcaaagatgcattacatggatattttgcgttggggatcaagcagcttcatgtacaggaaagtttcacctatatcaatgaatttctgaaagaggaaatactgtgagtaagaaaaaagcacgttggagaaaactagataatgcagcaaaattatattctgctgccagtaataaaaaagatacgagagtgtttcgtttttactgcgaattgaaagaagaagtaaatcctgacgttttgcaggaagcattgaatcagacaatagaaatatttcctacgtttttaatggtgcttcgcaaaggattattctggcattatcttgagccatgtaatttacgaccgattgtaaaggaagagtacaaagagccttgtagtagactctatataaaggataagaagacactgctttttgaagtaacctattataaaaaacgaatcaacttcgaagtattccatgtattgacagatggcacaggagcgacagaatttttaaaagaactggtaaaaaattatctctatcttattcacaaagtaaatggattagaaccagtttcattgttaccagaagatatgacggtacaagatcaagaagttgatagttttttgaaatattattcaaaagatcagaaacgaccgaaaaaaagaaaactacatgctttccagatacggagaaaaaagaaagatggaaatcatctgcacgtccatgaatctgttgtttcagttcaggcagtattgaagcggagcagggaactcggagtatctatgacagtctttttgacagcattatttatgatggcaataaatgaagaaatgtctaaaatgcaaaagaaaaagccggtcgtgttaatggttccggttaacttaagaaagtttttcccgtctttatcgatgctgaatttttttaattggattgagccgggatataattttactacacaagatcaaagttttgaggcaatactgaaatatacaaaagaattttttgagacagaactgacaaaagaaaagatgtcagcacatatcagcgagttgcttgctttggaactgcatccgattctgaggcttgcacctttggaattgaaaaatttatgtattcaggccggggcaaaatattcagagaagaacacgacagcaatcttctctaatatgagtgcggttaaaatgcatgcgagttatgtgccttatattgaacgatttggtgtgtacacaaacactcctaagtttgaattgtgtttgtgttcttttcaggataaattatcatttgcatttacatccagatacgacacagtgaacattgaacgtaatttttatcgcttgttaaaagaacagggaattgcatctgaaaaagtaaaacctgaatttccaaagacagatgagccaagcgaacaggaaatgaaagtctataaaatttatagctttctgtgtattgcaattgttgcagcaatgcttgttacggagtataatttccatcctagaattcgctggaccttattcacagccggaggcgttgtgacaatgtggattgcctcatcgattggattttttaaacgctataacctgctgaaaaatgcgatgtggcagctttttatcggtactattatctgctttatatgggatgcactgaccggttggcacagttggtctgtagatcttgtgctgccgatcatgagtgtatctacacttacagcgatgtttgtaaccgctaaggtgcggaaatgccctgtgcgagagtatcttatttacgaaattatggctgccggatacggattgattcttccgggaatcttactcttatgcaaagtggtgaaaaatccaacagtaagtatgtttggagcgttaatatgtttcctgtttcttgtagcagtgatattgtttaaaggaagagaatttaaagaagagatgcagaaaaatctgcatgtataaaatagtgttgatgaaacattagagcgtgtctgaaaaatcattcccgcaatctgcacgccccactttgcgggatatttcacccgaattcagttgacgtagcccactacggcgccctcatccgggcaaaatatcccacaaattgtgacgcacatcttgcagaaagcctttttcagacacgctctgaaaatgctgaactgaataatttcattttgtcagaaagcattgttagaagtagcaaaataaaggagtatttaattatgaagtatgaaacaatagatagaattagaaaatttacagaagatcgaaactgggatcagtttcattcgccggcaaatcttgcaaaatcaatcgtaattgaggcagcagagttattagagtgttttcagtggtctgatgaagaatatgatctgcaacatgtcaaggaggaattggcggatattttggtttatagtcagaatctgttagacaaactggaactggatgcagatgaaatcataaatatgaagatgtcacagaatgaagcaaagtatccggtagataaggcaaaagggagtgcggccaagtacgatcagctataatagtggaaaaggaagaggcgttataagaacaatgataaaaatactatttatatgccacggcactctttgaaagcttcgcccaaaagccagtaaaatcacagtctgaagggcataggcggttagaaaataacccaaaaataacccacagtattttgtgcagatatgtctgggatgcaatatgatagaatggttacaagaaaaatttgtaggaatataaagatatggaattaagattattacgctattttttaacagtagcaaaagaacagagctttacaaaagcagcagaacaattgcatattacccagccaacgctatccagacaaatggcggcatttgaagaggacctgggaataacattatttattcgaaacgggaagaaaatatcgctcactgatgaaggaattttattaaaaaggcgtgccttggagattcttaatcttgaggaaaggacgcttgaggaactgaaaggaaaagaagaggttgtagagagcacgataaccattggatgcggtgaatttgcagcagtggagacattggcgaagatatgtaaaacatataaagaaaaatatccgctggttcagattgtattgcatactgcaacagcagatgcagtgtatgagatgatgaacaaaggacttgtagatattgcattattcatggagccggtggacaccgaagggctggattatatccggatcacagattgcgatcactggtgtgtcggaatgcggccggatgatccgctggcagaaaaagagtttataaaaaaagaagatcttattggaaagcccttgatcctgccggaaagaatgaacgttcaaagtgaacttgccaactggtttggtaaagacttttcaaaattacagattgcttttacgagtaatcttggaacgaatgccggagttatggcggcaaatggactggggtatccaatttcaattgagggtgctgtaaagtattggcgagaggatattcttgtacagcgaagaatttctcctgaaatcacgaccagtacggtgattgcctggcgacggaatatcccatattctttggcagtccgtaaaatgatcgaggagattaatgcttttcaggcataaaacaaaattcaatataagcattagacataatgaagcgatagagcttaaaatagatgtgtaagatgaatgtaaatcttatacatctattttttgtgaaaaatacgtatagaaaggggctttttattatgagtaaaaaattagtggcatttttcagtgcaagcggaacaacaaaaaaagtagcacagatgatcgcagaggaagcaaaagcggatttgtttgagattgagccgaaagttccatatacaaagcctgatcttgactggatgaataaaaaatccagaagcagtgtggaaatgagtgataaaaaatatagaccggcgattatgaaaaaagagatggatatgagttcttatgacgagatccttctgggattcccaatctggtggtatgtggctccgacaatcatcaatacatttttagaagcttacgatttcagtggtaaaaagattgtgctttttgcaacatccggaggaagtggatttgggaacactgtgaaagaattgcagtcatctgcatcagacgcagttattacagaaggcagactgttaaattgtggaacgaaacaggaaatcactgaatgggtaaactctttataaataacagcgttatggaggtatacagaatatgggaaaaatagtacagacagcagggagaaatacacttggtgaattcgcaccggaatttgcacattttaacgatgatgtacttttcggcgaaaactggaataaccaggacatcgatgtaaaaacaagaagcattatcacagtggttgctctgatggcttccggaattacggattcttctttaagatatcatcttcaaaatgcaaaaaatcatggtgtgacacaaaaagagattgctgcagtggtcacacatgtcgcattctatgcaggttggccaaaagcatgggctgttttcaatcttgcaaaggaagtgtgggaaacaggcgaaggagatttgccatacgaagaggaagcgatgcgggcgcatgcaaaagagatggtatttccaattggtgaaccaaacgatggctttgcacagtatttttctggcagaagttttcttgcaccaatctctacatctcaggttggaattttcaatgtgacatttgaaccaggatgcagaaataactggcatatccatcatgcaaaaagtggaggcggacagattctggtatgcgttgccggaagaggatattatcaggtggaaggtaaagaagctgtagaaatgaagccaggcgactgcatcaatattccggcagaagtgaaacactggcatggcgcagcaccgaatgaatggttttcacatctggcaatagaagttccgggcgaaaatagttccaatgaatggcttgaaccggtaagtgatgaagaatatgggaaattacaataggaagctgaaggaaatgtttgatgacagtattgtattgaataatggagtgaaaattccacaccttggtcttggaatctggtttattgatgaggataagactgctgacgctgtaaaagcagccgtggacaaaggttaatcagtgcgaagatagataatatagagggaaatcgtgcggcatccccggtagtaacaaccgggtactataattacattataacagtaaaaatgtttttatcaaggagaaatatatatgctttataatcctcagcttgaaacttttttgtgtgttgtagagtcagggagcttcagtaaggcagcagaaaaactgtttattacagcaccggcagtgatcaaacagattaattctctggaaagcagtctgaatctgcagttatttgaccgtacccataggggacttattgtgacagaagcgggaaaatctatttataaagatgccaagtatattattcaatacagtaaagaatctctgatcagagccgaaaatacaatgcaaggcgataaagaagtcattcgtgtaggtatttcaccaatgacacctccgcagatttttggcagtttatttcccaaaatacaggaactttatccagagataaagtttcagttgatcccgtttgaaaatactccggaaaatgccagagaaatccttggcaatcttggacagaatattgatgtagttgcagggatttttgatgatacactgctggatcttcgtaaatgcagaggaatagagatcagcagagaagaattctgctgtgcagtatctatccatcaccgtcttgctaagaaagaatacctggaaatccaggatttgtatggagaaaatcttatgctgatccacaggggatggagtgaatatatagatattctaagagatgatctctgggaacatcacccggaaatacagattgtggattttgatttttacaatatggaaacttttaaccgctgcgaaaacagtaatgatgttttgcttgctgtaaagagttgggagagtattcatccccttatgaagattattcccgtaaactggaattacggaattcccttcggacttctgtactcccaggaaccctccagaaaagttaaaaaagttctggatgccattgaaagaaccagagacttataaccaaaagtatatagtgcataaccaaatgagacttctgccggagtctcattttttttataatagaatagtgagaatgttcataaagtattgattcataataaatgaaccaggcagtaaaaaggaggaaatttggaattgaataactttatttttgaaaactctacaaaagtattttttggaaaaggatgcgtgaaagaatatctttcctgttgggccggtaaatttggagaaagagttctgctcgcgtatggcggctgttccattaagaaaaatggtatttatgaagaagtgacgagtattcttgaaaaagcaggaaaaactgtgatcgaattttccggaatcatggcaaatcctacttatgaaaaagtcttggaaggggcaaagatcgccagagagaatgaggtagactggattcttggaattggcggtggttcagttatggactgctgcaaagcagtatcccttgctgctatcagtaagaaagatatctggaaagaatactgggcaaagccaggaattattgattttgaaccgttacctctcggggtgatcgtcactgtcgcaggaacaggaagcgaatgtaacggcggagccgtgattacaaacgaaggactgaaagtaaaaacaggtcgggattacccgaaatgtaatccgaaatttgctttaatggatccggagtatacttatacagttcctgtcagacagatggtttccggaagttttgatatcttgtcgcatatcatggagacatatttcagtgaaccggacgtaagcaatgtatctgatgatatttccgaagcattgatgagaaatgtaatccagaatcttcgtgtggcaataaaaaatccagaagactatacagcacgcagtaatcttatgtgggacgcaactatggcagaaaaccgtgtcatcaagcttggtaaaaagtgtgattttgaatgtcatcagatggaacatcagattggagcttttacaaactgtaatcatggagagggacttgcagtgttgcatccggtttattatcgacatatttataaatatggtctgaaaaaattcgtccgtttcgcagaaaatgtctggcaaatcagaagaggtgatatgactgatgaagcactggcagaagcaggaataaatgcgctggcagattttatcagagagattggacttccgaccagtctgaaagagcttggagttacggaggatattgatctgagagaaattgcagattcctgtaatctgtcagttggaagttataaaaaaatgacacatgaagaaatcctagaaatcttcagggaatgtatataaatctggggtatcagaaatgcacagaaaaaagagatgttattttgtggagattttattaatttgtttttatgttctgtttgcctgcagcgttatcgttgcaggcagggaaagaggacactggaaataagatgaacacgaaaaaagaaagagaagctgtttatgaccgccataccaaagttcaggatgtaataaatgatccggcatttggaagttatggacgcctgatctttccggtagatatacagattgacaatagcctggaactggaagatgtagaggaaatccttccatggtacagtgaagtaaatccggacaaaactgtggaaattgcaaattatatgaaaaatcaggctgccagagatgaacagattttttatgacatttatacagatgaagagaaggcagcagacccggaaaaagaggagacaggactgttctttttccgtggagatcccggagagaagtttgctgttttaaatgcaggcggaggatttatgtatgttgccggaatgcaggatagttttccgcatgcactagaattatcaaaaaagggatacaatgcgtttgctctgatctatcgtccaggagcgcagactgcctgtgaggatctttcaaaggcaattgcctttatttcagatcatgcagaagaacttcaggtagatccggatgattattctctgtggggtggttctgccggagcaagaatggcagcatgggtaggcacttatggaacttctgcatttggtgaaaaagaatatcccgcaccaacagcagtgatcatgcagtatacgggactttcagaaattacaggagaagagccgccaacttacgcatgtgtgggaacaagtgatggcattgcatcataccaaaccatgtctacgcgaatcaacaggataaaagccaacggtacaaatgcagaaatagaaatctttaaagggctttcccatggttttggactgggagaaggtactgccgcagaaggatggctggatcatgcagttgagttctgggaaaacaatatggagtaaacctgaaatgaaaccaaaaataaaattaaaaatatgcatagatatactgatgacagcggcactgctttttctgatgccctatgaactgtttggaagagcagcacatgaatggattggaacagaaatatttttactctttatcctgcatcatatattaaacaggaaatggactgcccatatgttcaagggaaaatatacaaaattccgtatcctccagacgatattagtggcagcaatttttatcagtatgatcgggggcatggtaagcggtattctgttgtcagaatatgtatttgcagctataaaaatcaaaggcgttgcaaatatggcgagaaatattcatatgctttgtgcctactggggatttatcctgatgtctctgcatctgggactacactggaacatgtttctcaagatgcttgacaggaaaatacacctccctgccggaaagaaaaaatatatattccggattttggcaggagtaattgctgcctacggatgccatgcatttataaaacgccagattggaagctatatgttcctgaaaaaacacttcgttttctttgattatacagaaccactggtattttttatgttagattatattgctgttatgggtcttttcattgcagtcggatattaccttggtctgttcctgagaaaaaatcattagagatcaaatctgttttttaaccgagtcaagctgtgaagcagctactcggttatgggcaagtagcgaagcggattgcgaatatccgctttgacttaaaataaccggaacatatcagggaaatatgttccggttattttatgaaagctatgtttgtgactgattaccagtttttcttttcggtttcgcttttatggttgttttttcgctcttctaccatttttgcgaaccattctaccatattcggatcatagtgagagaagaaagagcttgcctttttgtctaactgcgtgatcttttccatatcttcagctgagagagtgaagttaaatacattaagattctctaccatacgttcataatgtgtggatttcggaataactacaacgcctctctggatgtgccagcgtaagataacctgagcacttgttttgccatactttgcaccgattttctttaatacaggttcctcaaaaagaccgccgcgcccctctccgaatggagcccatgcttcaatctgaatgttatatttatccatccatttctttgcttcaatctgctgattgtgaggatgtgtttctacctgattgaccattggacggatatttgcaaatgaagcaatatctacaagacggtcaggataaaagtttgatacaccgatcgcacgtacagtaccctctttatataagtcctctaatgcatgccatgctccatagtaatcagaaaacggctgatgcagaagaagcagatcaagataatctgttttcagctttttcagagattcttccacggattttcggcaggcatcataaccataatgttctacccacacttttgtggtaagaaagatttcttctctttgaagtcctgatttttgaattgcgttgccgacttcctcttcattaaagtagctctgggcggtatccagacttctgtatccggcttttaacgcatccaggacgcaacgctcacattcatcctttgttacctgatatacgccatatcccatgatcggcattttgacgccattagaaagtgttacatattccattgtagcttactcctttcgtgttgtttcttagttctcttttattatagaaaatgtaaattccaaattgaagattctctttgttttgcagtttaaaccttttggtaaagtctgagaaaataataagcagtataaaccatgaggtatatactgcaaaactaatagaatcttccagttaaagtggaaagattatataatatagtcagaaacaaagttgaaaaggagagtcggaaaatggaatatacaacattaaataatggaatcaaaatgccaatggcaggaatcggaacttttcttctttcaccggatgaagcagagaattctgttttatctgcactgaaagaaggttatcgtctgattgatacagccaatgcttatatgaacgaaaaagcagtaggacgtgcaattaagaaatccggtgtgccaagagaagatatctttcttgaaaccaaactgtggccgtctttttatgagaacgaagatgctgtagaaaaaactctggaaagactggatacagattatattgacctgttactgatccaccagccggcaggaaattatattgccggttatcgcctgatggaaaaagcatacaaagagggaaaggtaaaagccatcggactgtcaaactttacaaaagaaggtgtccaggaaattttagatatctgtaaggtaaagccaactgttttacagacagaagttcatccgtatgatcagaaaaaagaactgaaagaatttcttgcaaaagaaaatattaaaattcaggcgtggtatccactgggtcatggtgatgcggagcttatgaaagagtctgcatttgtgattgcaggaacaaaatacaaaaaaagtacagcgcaagttattctccgctggcatattcaggatggaaacattgtaatcccaggttctaaaaatgcggaccatatcaaagccaatctggatctgtttgatttccagcttacagaagaagagaggaaagaaatcgcagcattaaataaaaataaacctattatcatcagacaccggaacttctgaaaaaatatgcagaaatggttccgccagtagatgaacagaaataatgaagaggagaataaatttatgagtatcttatttatcaacggaagtccgaataaaaatggaaatactgccgcactggcacagattttactgaagggtaaagaatacgaaacattgaatctgacagaatataaagtttacagttatggtcacaaattcgaggatgaccagctttctgaaatcattgcaaagatgaaagaagctgatacgatcgtgatcggatctccattatactggcacaatatctgcggtgctgtccgcaatgtacttgaccgtttctatgggttggtacagcagaatgaactttcaggcaaaaaaatgtattttctgtttcagggcgcagctcctgaaaaatggatgatggaagcaggagaatatacgatgagacgttttgcaggactttatggaatgacatacataggaatggcaacagacagatcagaagcacagaaaatgtctgcaacactgtaaggagaacttatctgaatgaaagcaaacaggatagcaatgcttggtcttgcagttctgcttggaagcacagtatatggaaacgtcagtgtcataaaggcagaaaatgatcagctggaagaagggcttgatgccattgaggatgcgataggcaagggtaaagattctgacagtgaaaataattctcaaagtgcatcagaagaagaaacagatatgcaggaaggaacttctgacaatacaatcggaactccggacgatttcccggcagcttatgactttggcagtggaaagatcagtgatttttccagagactatatgctgaaaaaaatgctggaaccagaacagaatgatacggttttgaatacagatgcagatccggacaatatccaggttctctatttatgggaagagggaaatatccctgcgaaaacaaagtttacaaaagacatgacgggttattttgataactgggatttccgtccttatgtgacagcaattcctgtcaggaaaggcgtaacgccaaaaggagctgttgtactgatggcgggaggagcttatcagttccgtggtaattatacagattccctgccaactgcagctgctctccgtgaatatggtttccagacatttattgtagactaccggctttctccttatactcaggaagagggtgcgcttgatgttgccagagccgtccggtttatccgaaaaaatgcagatgtatatggaattgacccagatgatattgcagtcatgggattttctgccggaggaattcaggcaggtgagtttcttatgcattacgatgaggatgtaaacggaacagcattggattcttcctatgtcccggatgaattagaccagattccggctcatgcttctgcagacggtatgatctattctttctatggaagattgagtgtgggaaacatggatcctgactggctttcagaaggagatcttccgccaacgttctatgtatatggtacagaagatccattttatgatcagtttgaggaacagtatgatgtgctcaaaaatatgggcatccagactagccggattgtcctgagtgggtggccccatggtttcggctccgatggaggatgggtaaaacagtatgcggaatggctggaagagattttcaaacaggagtgatgagaaacagacatgaataaaaagaaattaaaaagactgctgatcataatcttgatcctcataatcattcttatcggtggaggcggatatttatttatgggcagtaaagttaccgatgccagtgataatgtgactgcaggagcagatggaactaaatccctgattgtatatttttcaaggatgggtgaaataccaggggaaccggatgcagtttcatcagcgacggtaagttccaactctgagatatccggcagtgataccgaagccgcagcacagatgatccggcagatcaccggagcagatatgtatcagataaagacaaatcgatattatcgaaaatcatttataggtacagcagcaagggcgtggattgagaacactttgaatatgcgtcctgcactggccgcaaaaccggaaaatctggatcagtatgacacgatttatgtgggttacccaatctggtggtttaatgcacctatggcgattggatcttttctggaaagttatgatctttcaggaaaaacaatcgtaccattctgtaccagtcaggataacggaattgatgttagcatggactatataagaaagaatgctaaaaatgcagaagttctggacggacatcggattcacaactctgactctgcggaaataaaaacatggttaaaagaaattggaatatccatttcagattaatcagaaaggggactctttaaatgaaatttatcatgaaaaatattgcttgtatgttatcttttgtacttgctttcatattagttttttcttttgcagatattaatgtacaggcagcatcaggtaagaagaaaaatgttgtggttttgtatttctctgcaacaggaactaccaaaggagtagcacaaagaattcaaaaggcaacaaatggaaaactgatcgaaatcaaggcttccaacccttatacagacgcagacttaaattatggaaacccggacagtcgtgttgtaaaagaacacgagtctgccagcagtccagctaaaagtaaagtgcgtccaaagatctccaatattaaaacgattcagaatgcagtaaagaaagcagatgtcgtttacattggttatccgatctggtggggagaagcacctcatattatgtacagtatggtcgaaaaaacaaacctgaaagggaaaaaagtagtaccattctgtacatcactcagcagtggtattggaaacagcggcagccatctgcgtacacgtgcaaaaatatcttctaaaacgaaatggttgaaaggccgtaatttttatcaggttccgtcacagaagaatatcaataaatgggtaaagacaatttaatcggtatatatttacagggagtcggtaaaacggctcccttttgttatttgatgagttttaaccaaaaggtttaaactgcaaaacaaagcggctcttcttattgaaaatagcctgagttacaatataactgtaaaaaagataacgaaaaggagatgccagaatgaattcaaaaaaaatactttccatgctgatggttggtgcaacagtaacaagtctgatggctggaagtgtcagcgcatatgccgctgataatacagaaacaacagaagctgcttcttctgaaacaacagaacctctcacaattgcaaaacagggtattttctcagcaggaggaactactattacttcagacggtacatttaatccggaagatcagtgggaagaaaccggtgccggtcagacatctcatgtcgatcatgcaaatattttataccagattccggaagaagaaaccagtttgccaatggtattcctacatggatatggacagtcacgtatgggctggatgacaactccggatggaagagaaggatgggcagaaatgtttctcagagatggacatagtgtttatcttgtagatgaaccaagacgaggagaagcagggcagacatctgtaagcggtacgatcagtacaaaaactctggatcagcgctggtatacacaatttcgtatcggtcgttgggaagatggaaaatcagttccaaatgaaggttctcagtttcctaatgacgataattctgtagatcagtttttccgtcagatgactccggatacaggaatgacttctgatatgggtggagattttgataatgatgtagttgcccaggcactggcctccacagtagatgaggtatatgaaagatcaggaaaagattctattcttgtaactcattcacagggcggcggtccaggctggacagctgctaaatatacagatcatattgcagcgattgtagcaatcgaaccaggcggagcaccatcatcagattcagaagattaccagacagtcctcgaaaagaaaataccaattactatgtattttggggattatattgataatggtgatactgcaatccaggcaacaggtatgtggcagggaatgcgccaggcatgctacgattttgcagatgcctatacaaaagcaggcggaaactgtactgtagtcgatcttccgaaagagggcattacaggaaatgatcattttatgttccaggatctgaataatgatgtgatccaggaacatattgaaaactggatacaagaaaatgtagaagcataagtaaaggagaggacaaaaataaaagcaaaaaaaataatttcagttattcttacaggtattgtagcagcaagtatgcttgcaggatgcggcagcagttccaggagtcagacagataacacagaaagttcttctcagaatgaggctagcagttcttctgcaagtgaaacagcagatgcaacggaggattctgaaaatacagaaacaactgaaagtacggatacatctgaaaacacagaaacacctacaccagcagaaaccgatgattcctctgagacagctgttgcagatgatacggaatctacaggaaaaactctggttgtatattattctgcaacaggaactactgaaggagttgcacagacaatcgcagatacaacaggcggtgatttatttgaaatccagccggtggaaccttatacagatgatgatctggactggacaaatgatgatagtcgtgtatccagagaacatgatgatgaaagtttaagagatgtagatctggtatccacatctgtagataactgggattcttatgacactgtattcattggttatccaatctggtggggaatcgcagcatggccggtagatggatttgtagaagcaaatgactttacaggaaaagcggtaatcccattctgtacagcagcttcttccggcatcggcgacagtggaaatctcctagaagagatggccggaaccggaagctggttggaaggcaagagattagacagaggaatttctgaagacgaagtgaaagactggatcagtgatcttggaatttcttctgtagaaaactaaaacgagacaacacatttgacagcaaacactttcagaaccacttaaccgcagataaataaaatatatgaaagagcaaaagagatatctgctgatcgatggaattcgtggattggcgattgtaaatatggtggcatttcattttttatatgatgtaaatgaaatctggaatataaacagtcactggtatgaagaaaaaagcattcatatctggccgcagccacttttcacttttcttgaagaatatgatttttcaggaaaaacaattattccttttaattcacacggaggaagcggattctccaacacaattgaagaaataaaagaacttcagccagatgccaacatcagtgatgagggcttgagtatttccagagacaaggtagctgacagtgtacaggatgtaacagactgggcaaaaagtcttgatttatcagagaaatagaggtcagaacagtaagaagtttcgcaaataaataattttaaggggaacagacatgagtaaaagaattttaggaagggatttagaggtatcttccatcgggcttggctgtatggggatgagtcatgcttatggaagaccatcagataaaactgaagcgaagaatcttcttgcaaaagctgtcgatttaggatatacaatgtttgacaccgcagaagtgtatggtactgccgaaaatccgcatcataatgaaacacttttgggagaaatcctgaaaccgtatcgaaatcagattaaaattgctactaaaggtggtttgcattttgacgaaaattcaacagttgtaaacaaaaatctggttccagacagccgaccggaagtgctaaaaaaatccgtagaagattctttacagagacttcagatgaatcatctggatctctattatatccatcgtgtggatccaacaattcctatcgaagaaacagcaggtgtaatgaaagaactgatcgatcagggaaagatcacacactggggaatttcagaagctacagaggaaatcattcgaagagcgcacaaagtctgcccgcttacagcggtacagaatcgttattctatgatgtacagaaattacgaatcattgtttccggtactgaaagaattacagattggtttcgtggctttttctccattggcaaatggttttctgacctgcagatatgatgagtattctacttttgaaaagagtacagattacagaagcattatgccgcagttttcttccgcaggaattgtagaaaatcagaagcttatagaatggctgaaaattatagcagcagaaaaaaatgctactccggctcagatttctctggcgtggatgctggcaaaaaatccgtttcttgtaccaattccgggaacaagaaatctgaaacgtctgacagaaaatattctggcagaatccattcatctgtcagtagaagaagtcacagaaattgatgatatgcttgaacatattccgatgtctcaggtatttggtggttcaaaagtcaaaaaataatattccacccgaatgtctgagaaagatgttcgggtgtttacatataaccgacaggagatgatcacactatgaaaaataaaaaacaaatggcagcagttctgttatctgcaatacttggaatcactgcaaattcatggtttgtacaggcagacagcagtgtaatccaggatgatcaacaggagccagacaacgaagcacccgattcagataaagttacagaaggtacagatacatacaaaggttttctgttggataatgtcctgcattcaagtgaagagggagatattcattataatgtctatatcccggatagttatgatggaagtaagccatatgctttattctttacacttccaggctatgaaggattgtactttcaaggcgtaggggtaaatatcaaagcagaagggtttggtttcgcagctcaggaatataatccggaaatgattattgttgcacctcagctgaatgactggggagaaacttctgcgagacagaccattgctttaacagaatattttctttctgcttataatattgacaagtcaaaagtatatgcagaagggtattctggtggcggtgagaccatgtcacttgtaatgggaatgagacctgatttatatactgcttatttacaatgcagttcccagtgggatggtgcatacgaaccagtggtacaggcaaagacacctgtatattttgtagttggggcacatgatgaatactatggctctgagccgtcagaagatgcttataataatttgcgtgaattatatcagcaggaaggtctgtccgatgaggaaattgatgacctgcttgtactggatgtcaaggatgattcctatttcagtgaccagggtgttactaatcagcacggacagggcggcggattatttgtagaagacgatgttgttatgggatggcttttgggaaaataaagaaaatgtatgaatgatacagaaaagaggaaaaagaaaatgaaagtattacttgtaaatggaagtccacataaggacggatgtacttatactgctttgtgtgaagtatcagaagcattaaatgaacagggaatcgataccgatatcttctggatcggaaagaaaccattgtcaggctgtattgcctgcaagtcttgcatgaaaaacaataaatgtgtattccatgacagtgtaaatgaattcctggaaattgccggagattatgaaggatttgtatttgggacacctgtacactggggaggggccagcggcggcggttatgtcggcaagaagagccggcactactgcaacctgggatcagatgaataaatatttcggtctgatgcagatgccgattattacttcaagatactggaatatggtacatggggcaaatccggaacagataaaacaggatttagagggtatgcaggtaatgcgagtgcttgggaataatatggcgttttttctgcactgtaaaaatgttgcattgaagatgggaatctctatgccaaaacaggaaccaatggtatttacgaattttataagatagacattttttgactgttggatgattatggataaataaaatatgaaaagttgatgtttgaaagctcattgaataactgcgcgtcgcattctcgttacttccagtgatgagttagacgcgcaaatttttttgcaaaacaacagaacaaatgtttacataaactgatacatatggtataatatttatatggaaaaagatatatttaatataaataaaaacaaactttcatatggtaggggatatgtctattctctgcagtatcatcttgtctggtgtacaaaatacagaaaaaaggttttaaaaaacggaatcgatacagaatgcaaagaaatgttacagaatcttgcagaagaatataaatttcagatcctggtaatggaggtgatgccggatcatatccatctgcttgtggactgtaaacctcagttttatatttcagatatgatcaagatcatgaaaggaaatcttgcacgccagatgtttcttgcgcatccggagttaaaaaaggaactgtggggtgggcatctgtggaatccgtcttactgtgccataacggtcagtgacaggagcagagaccaggtgcttgcctacatcgaaggacaaaaggaaaaagaaaagaaaaaagcctgacagaagaaatgatttgttggaggaaaagagatgcagaccgtatccagctatggcgtagaattacgaaaacagaatatcccagtccgccagacactggaaatctaccggtctgtggtcagttacctgacagaaatatatgagcaggtgtgggaagaactggcagagataccggatgccaaaaggcggtttaatgctgcagagcatctggtgcatactacaaaaaagaatcctgcacgctttgattttgatcttcgctttccgaagatgccgtcctacctgaggcgagccgcaatccagcatgcattgggaagtgtatcttcttacgaaacacggatggaactgtgggaaaagtcaggagaaaaagcagggaaacccagactggcgtatgagaatcatgccatgcctgttttttatcgtgatgtcatgtacagagaggaaaaagaaggaaaagacgaagcatacctgaaactgtatgatggtcatgactggaaatggttttgtgtgcgtttaaatcacacagatatggaatatctgcgcaagaactggtcggggaaaaaggcatcagccccgacactggagaaaaggcaccataaatatttcctgcgtttttcttatacggaagaagtgacacttacgaaaacaccggtaaaagaacagatcatctgtagtgtggacttgggaatcaataccgatgcggtctgtaccattatgcgggcagacggaactgtcctggggagaaaatttatcaatcatcccagtgaaaaagaccggatgtaccgcacactgggccggatccgaagattccagagggaacacagctctgcgcagtcacggggaagatgggcatatacgaaacgcctgaacatagagctgggaagaaaaattgcaggtgcgatcgtaaaaaatgcagaagagaaccatgcagatgtgatcgtattcgagtatctggaaatgcagggaaagatatccggaaagaaaaaacagaaactgcatctgtggagaaaacgggatatccagaaacgctgtgagcatcaggcacacagaaaaggaatgcgggtatccagagtctgcgcatggaatacgagcaggcttgcatacgatggctccggaagtgtgtcccgtgacccgaaaaatcacagtctttgtgtattccagacaggaaaaagatataactgtgacctgtcggcatcgtataatatcggagcaagatattttatcagagaacttttaaaatcccttccggtaacggaaaggtctttgctggaggcaaaagtccctccggtaaagcgtagaacctcatgtgtttatgcagatctgaaagaacttcatttacaaatggaaatcttaaaggcagcataaatgcaggcagatatacagtggactacctgcaatgtgggaacctgccatatctggcatggaaaaatgcgcataactgcgctgacctaagttacaggcgtatccgccgatatttagtctgacgcctaaagcgtctggaagcacgcgacttcagtcgtgtgaggataaagtttttaattcacttattatagtatcatgattaggagaatgtaaaaaatgcaaatgataacctgggtgatactgccggtattatgtgtgatagcagttgcagtttatctgtatcgaaaagtgaaagcagcagtaaaatgtttcttaccagcatattcccttaaaagacagcggatttttgcaggaattatttctctgctgttgattattcccgcggtcagaatttatggcatgtggtttataatcctgcttcattttactgtatttttactgttgctggatgcagttgtttttcttataaaaaaattgaaaaagcaaaatcagcttactggtttatggaataaaatatacagaagtggtgtaatagcaatattactgacagcagttctgatcgggtatggaaggtacaatatctttcatgtagtcagaacagagtacaatattcaaactcaaaagaatattcgtgaagaaggatacaggattgtacttttgtctgatcttcattacggagtttccatgaatgataacaatctgcaggatgtagtaaataggattagtgcagagcaggcagatattgttgttcttgatggagatattgtagatgaaaacacaacatcagagcagatgcagtcagcctttcgcattttgggacaggctgacagtacatatggtgtttattatgtttatggaaatcatgataagaataattatgctgcaaagccgaattatagcgcagaaaaaatggaagatacgattacacaggcgggaattcagattctggaagatgaaacaactgtcattaatcaggaaatcgcactgattggaagggcagatagaggaggtagaaatgcgaaaagaaaggatatttccagtcttgtaaaagaactgaatccagaacaggaatggatcgtactggatcatcagccttctgagtataagaaagcagagaatacaggatgcgatatgattttatccggtcatacacatgccggacagatctggcctgtcggattgtttgcatcgttattccattttgatgaattaaattacggggaacagaaacagggaaatctggatgcgattgtaacgtcaggaattgctggttggggctatccgatcagaacggaaaaacattcagaatatgttgtggtcaatcttatatcgtaataaaaggagtaattgaagcaaggagtggaattcaagaaagtagaaataatagagcgcatcacagattctaatggaaatgtgactgagaatatgttaacagtttggaaaaatttaaatcttaataataattctgctaatttgcgtataagtgaattggaagtttgttatgagaagatctttgtatttcaggagcatcctgtttgagatatttggacaggttttgatgtatcaattccaactcgaaagttgtaaagtggtgtaaagattaatgatctttgtattggcaccgaaaatatatttatttctccgcggcttttcttccaggatgggagagtgccgcggagaattttttgcgaagaaagaattgctatagcttttgtaattccgggaaaacctttatctaagaaaaaaatataatattaacatgaatatcatgaatataatattggaggctgtgaatattcccaaatacttccctctcagattcctgttttcttttgcaatatatttgaaacttatcaggcttgccatggatgcaatcagagtgccgagacctccaatattggttccgacaattaaagcccggcaattatctgtaaagccggataaaagaagcgcagcgggaacattgctcataatctgactggcaagaacagcagtaagtgtttcccttcctgccatgattctttccagaaaactgctgaattgcggaatccttccaaggttgccgataaaaataaataatgcgataaaggtggcaagcagggagtaatccaccctgcttatattttccctgtttcttagcagcatatatataagaaccaatacaagaggaatctggtatggaatgatacgtgcaacagtgagcaggcagattgtaaataagatcaggtaagcggccaggtattccatgttaagttcttttctgtcagagaatcccaaaagagttttatttttttcggaaccgcatacgtgaggtgctttggcagcggctacctgtatccatatcagaagaaggataagtgctgtggcggaatagggaagcatcagggttattaattctgccgcggacatccctgctctggcatatagataaaggttctgcggatttccgattggtgtgagcatgcttccaagattagcagcgattgtctgcatggctactattttaagaagccagtaattgcctagttcctttggcagtttatgcacaatgatcagtgcaagaggaacaaaagtaatcaatgccacatcattggtgatcaccattgacaggaagaaacataagagtaccaacagcctgatcacacccacagttcccgatgttcccatcagcaattttttggcaagtatatcaaaaacaccaacagccttcaaaccagctacaattgccatcaaacagaagaggagcccgagagtcctgaaatcgatataagtaaaataagccttatccggtctgacccagaacatagaaagaagcgccaggatcactgcaattgacaaaacggtttctttcctgaaaaaaacatataatttttgtaacataatatttcctttccggtctgatacgaccgcgtaaaagtatatcacagaaacatccagaaaaaaagaacatcattttgtattgtggattgtgtttgcgattaccgcctcattcctgtgtaataaaaatgttatcaatggcgacatcatttcaaaagttcagaatatgaaaggaaaacgttttggaagaactatacagaaaatatcagggaaaaacaataaaagatgactatgggaaaaattccaaggaatttatagattttgcaaatgacatgaaaaagagcatgaaaattaatgccgcaaaatatggattaaggcttattacctttgagacggggcattacgatatgtgcggatattttaaggacaacgaaagggatttctcgtccgttctgcaaaaggattgaacgattgcactggaggatacaacaactttacggacttgaagggatttttccaattttctctatttttttcataatgatcaccactttacaactttttcataaaaaaatatcgtacaggactttctgatgtataatgaatttgacccaaaacattacaaaggaaagtgaccctgtacgacaaaaacattatacaacgaaaaaacactgattggtagacttcatcaatattttttgatttattttgaaactttttctgttccgacagtagataccttatttctgctgatattatccatactgaccttagaatctgcacattccatccggcttctgtatcagcattttttatctggaataacggagaaatcactgaatgtattttattatgcatgttcctatgcaaaggttgattattccagatttatgaataccactgtcaggattactttgaagctgataccggattcattgcagacgcagcctgtatttctgtgcgtggatgatacgatggtatctaaatttggcacaaaatttgaaaacgtttcaaaactgtttgaccatgccgcacacaacggttccaactatctgaatggacactgctttgtgagtgtcatgctctgcgtacctgtctggaatagggataaagtatcttatctttccgttcctcttggttatcgtatgtggcagaaaaaagaatctaaactggaactggcagcctccatgatccggcaggttatgcctgaatttcacagcaaagatcatgtcatcatcctttgtgacagctggtatacaaaacagaatctggtatccatcgttgatgaatatccgaatctggatctgattggcaatgcaaggattgattctgtcatgtatgatcttgcacctgcacagaccggccgtcggggacgtcctgccaaacatggaaaacatctttctgttgaaacagattttacgttttccaatgaaaagattggtgattattataccggtgtccgccgggttctcgctaagatctttggcaatagggaagtccttgcctatgtcactgccacagaaaaagaacatggtacaaaacgactgtttttcagtaccattttcccggaagatctgcagattttctgtgcatggcaggaaaaagcaccattgaaccagaccggaagtgaccgtatgaaatacattccactgttgctatattcgttacgctggaatattgaaacaagctactatgaacagaaaacgttctggtctttttgtaactatatggtgcgaagctgcaaagggattgaaatgctggtcaatctgattaacatcagttactgtgccatgaagattctgccctatcagaacgaacatttttctgagtaccgtacaaaaagcgtacaggagttttgttttgaattaagtcagggcattcgcagtcagatattttttgccactttcgtgaaaaatatcgaaacacatataaaatcaaatgccatgacaaaggccttaaaacagctgattcatcaacaagtctatcatttataaagttgtaaactggtgtataataaaagcaagaacagaaatgttctcgatgtaagagcatcattaaaagttgggctgcagatggagcagggtaaacttccatctcattagatgtcttaactgggcatcgagcctggcagcttggataaagctgtagtccacgtgggggacttaatgattttcacgtcgttatgggtatcttaactgggtaccgaggctgacaaccagcagaaaactcttttacaaaagtaattctcagaagagtgtggtttaatgccacactctttttggcatgtgaggtataagtggcaacaaaggtagataagaaaaacgtaatacgacaaggtattacagaggcggaaatcgtatatttccaaaatttggcaggtaaaacatttctgtatgtttgtggagatgaatattttgaagtttcttttccaatagatcactttctacatttaacaggagtggagacaagactttcggccaaggatttttataagaatgcaaaaaaatctattcttacaaataatcagttctattttgacgcaagacatgtatatgcaaatgccaaaaggaaacttccgtgtttaaaacgcttgccggaattaacgaatgaaatggtatgtgttctaaaaaatatggaaaccatgacaattacatataaactcagcgttacaaatttggaatttacaggaagtgtgacaagaaagccaaaacggtatactgggaaaaaagattaagaaaagaataaagagctggttttaattgtaaaatttatggggaactaacatcagcttattgacatgaatttaaaaataagtataataatagttgagtaattgttcaactattattatttggaggtgaatatatgccaaaaacgtcttatatttgtaattgcgatgtaattcatgaggatattgtgaatgatgtgaaatccaagatgcagccaaaagatgattatatccagttggcttctttgtttaagctatttggagatggaactagagtacaaatcttacacgctctagaacagagtgagatgtgtgtatgtgatcttgcagtgctactgggggtaacaaaatctgcaatttcgcatcagttaaaggcattacgccttgcgaatctggtaaaattccgtaaagaagcacagatagtttactactcgctggcagatgatcatgtgaaagagattattgacaagggatttgagcatctttggcagaaataatattttttaacattatagttgagtaattgaacaattaaacaaattataaggagattagcatgaaacgcatatttctattaaaagggttggactgtccaaattgttccgcaaaaattgaaaaagaagtcggagagttggatggagtgcaatcctcagtggtaaatctgatgaagcagacgcttacaatcaatgttactcagacagccgcagatacgatagccagtcagattgaaacgattgtttatagtcatgagccagatgtggaagttcaggaagaaaccgttatgaatgttacaaagagttattcgttaaaagggttggactgtccgaattgttccgcaaaaattgaaaaagaagtcggaaagttggatggagtgcaatcctcagtggtaaatctgatgaagcagacgcttacaatcaatgttgctcagacagccgcagatacgatagccagtcagattgaaacgattgttcatagccatgagccagatgtggaagtttctgaaattgtacaggaatcttatataccggaaaaaaagcaggaggccaatgaatcctataacaatgaggataagaagttgacagttcgtttagcgactggtgcagcaatctatgccattggtatggcattgactgtttttgcgaaagtgccactgcctatcgagttagcttttctcattgtttcttatgttattcttggtggagatgttgtatggcaggctgtgaggaacatttcaaaggggcgtgtatttgatgaacattttttgatgagtgtttctacgattggggcttttgtcattggtgaatatccagaagcagttgctgttatgctattctatcaggtaggtgaattttttcagtcattggctgttaagcgttccagaaaatctatatcagacttaatggatatacgtccagattctgctacagtaagaagaaatggggaattgattaccatatctccagaaaatgtctccattggtgagattattattgtaaagcctggtgaaaaaattccattagacggtgtggtattggatggagattctatgctggatacaagggccttaacaggagaatcagttccgagaagtgttcataaaggagacgaagcactttccggttgtatgaatcagacgggtgtcttaatgattaagacaacaaaagcatttggtgaatctacggcttcaaagattattgatcttgtggaaaatgcgtcaagccgaaaagcaccaacagaaaattttattactacatttgcacgttattatacacctgtggttgtaatcttagcagcttttctggcgattctgccaccgatcattcttggcggaggatggacagagtggattcgcagaggatttgttttccttgtggtatcttgtccatgtgcattggttatttcaatcccgctgactttcttcggcggcattggtgcagcatctaaacgaggtgttcttgtaaaaggaagcaattatttagaggcacttaataatgtcagcgttattgtgttcgataaaaccggaacacttacaaaaggtgttttcaatgtgacggatattttgcctgtaaatggattttcaaaagaacaggttctggagtatgcggcagaggcagagagtttttctaaccatcctattgcaaaatccattcttgctgcttatgaaaaagaaattgatcagtcagcgatttctgattataaggaaatttcaggatatggaatcagtgtaatggcaggggaaaagaaagtttttgctggcaatacgaaacttatggatacagaatgtatagagtacacaacctgtgaaaaagcaggtacaaaagtttatttggctgtagatggtcaatatgcaggatgtattttgataacagatgaagtgaagccggacagtaaaaaagcaatttctgacctgaaacatatcggcgtggaaaaaacagtcatgcttaccggtgatgatgaaaaaattgggaagtctgttgcagaagaattgcagttggataaatattatgcacagctgcttcctgaccaaaaagtggaaaaggttgagcttttagatagtaaaaagagaccgggaagcaaattggcttttgttggtgatggtatcaatgacgctcctgtccttgcccgtgcagatgttggtattgcaatgggtgggcttggttcggatgcggccattgaagtagcagatgtagttctgatgacagatgaaccgtctaagctggtggacgcgattgaagtagcaaaagcgacaaaacagattgtcatgcagaatatagtgattgctcttgggattaagagtgtgttcctgattcttggcgctcttggtattgcgggaatgtgggaagctgtatttggtgatgtaggcgttaccataattgctgttttgaacgcaatgagaattttgaaaaaataggaaatgaggtggaaatgtgaaacgaaaactgattctgttagttgttacgattgtttttcttgtaggttttggtgtcattttacattcaccgccttctatgattgatgcagtcacaggagcaacaccgaagtcaaaaaaggcggctcaagcctccgcacagttggaaggctcttatgttctcggtattaatatgatgtcagatggtctcgacaacgagaacactcggaataaattaaaagaattggcactggacgattcggaaacaaatgaaacagatctcatgaaaacggacattagttttcggttatatgtatctgagacggattatccgcttgtcagttatgctaagaaactctgtgacaggttgaaacaggccggtttttccgtagatctgaaagagtacagtaacacaatgatgctatcaagagtggtaagtggaaagtatgatgtattcctggcatcggatgattttattgacgttacaacgctaacacagatggactatatgatcatggatagcgaagaaatgaggtgagcgggaatttatgagaaaatggaatacgattttgtctgttttaatgcttctcatttttatgattcatggaatcatgggtagctttatgctgaacggagttggaagtagtgcagggaaacttcttgcatggattggtgttggtattcttgttgtgcatacggtgattggtgtcatcctgacagttcagagtttacagacagcgaagcaatcaggaaaaatgtatctgaaacagaacgccatattttgggcgagacgagccagtgggatggcaatactgattctgctgttattccatattggcttgtttggaaaggtgcagaatgggacatatattttgttcccttttacaacggtaaagatggtaactcagcttttgttcgtagcggcaatctttgttcatatttttatcaatatacgcccattgctcgtatcactgggaatcattagttataaagaacgaaggagcgatatttatttgatcctttcggtgcttcttctttttatagcgggagcggttattttatattatattgggtggcaatatctatgagtaagacaattattattataggtgctggactggcaggactttcagcggctttgcaggcagcggaaaatggatgcaatgtaaaactggtttccttccttccgtcagagcgggcacagtctgttatggcggagggcggtatcaacgcagctttgaatacaaaagatgaaaacgacagtcccgaagaacattttacagatacaataaaggcagcatgtggtctggcagatccaaatgcagtttggggaatgacacaggcagcaccggagctggtgcactggctgctaaaacttggagttaaatttaacatgagtggctatgatgatgtggatctgcggaattttggcgggcagaaaaagaaacggactgcttttgcacagagcgataccgggaagcagatcatgacagctatgatagacgctgttcgcaggaaagaagcatctggtatggtagaacggttcagccatcattctttcctaacacttcgtctgtgtggcaatatttgttgtggctgcgtaatcagggatgaatacagtcaggagactgtggaattaccgggggatgcggttattgttgccaccggtggtatgcacggattgtttggaaatacaacgggttcgctgagcaatacaggagaagtcaccgcagaattgttccggcttggtgttcctctggcaaatggcgagatgatccagtaccatccgacaactgtgaaatgtggtggaaaacgcatgctcatcagcgaggcggccagaggggaaggtggcaggttgtttgccatgaaagatggaaaacaatggtatttcatggaggaaaaatacccggagcttggaaatctgatgccacgagatattaccgccagagagatatggaaggtcagccatgaatcagaggtatttcttgacatgacggaaatatcggaggagattatttcaaataagctatctggtctggcagacgattgtatgacctatctgcataaagatatacgaaaggaaccggtgtctgttttaccgggaattcactattttatgggaggcattctggtggatgagcagcacagaacgccgattcagaatctttacgctgctggagaatgctgtgcccaatatcatggtgccaaccgtcttggtggaaattctctgttaggagcgttatacggaggacgtgttgcggcaaaatcagcatgtgaacaggcagatgtagtagatctatcttgtgcgacacagatagattttccaccaacgtctcaaatttcagaaataaagcaattaaacaaagtgatgcaggatactatgggcgttgtcagaaatgagaatacgttgttaaatgggattcaaacggtacaagcgctgacaggaaatcttccattgcttggcatggcagttctaaagagtgctcttgcaagaaaagaaagccgtggtgcacactggcgggaggattatccgaagaacaatgacgatgattaccttaaaacaacggtagccagatttgatgaaaagcagatacagatttcctttgtacctgttccagaaaggcggtgattcacttggtatataaaataagaatcaggcggcaggagagtcagaaatcagacagttattggcaggaatttgagtttgacggaagcaaaaacagctctgttgccaatgttctaaaggaattgaacagtagaacccctttgaaagataattcagggaatatagttactcccatcagctgggaatgtagctgtatggtgcgaaaatgtggtgcttgcgccatgctgattaacgaacgtccgaggctggcatgctctacatttctacatacgttaaaaggttctacaatcaccttggaacctttaagcaaatttccgcttgtaagagatttgatcgttgaccggtcaattctgtttgaaaatttgaaaaaactgaatctttggcttgaaagtgaagcttatatgaatccgtggacacatgaaccgagataccagtcggcacgctgtctgatgtgtggctgttgccttgaagtgtgtcccaacttctctgcaaatgggactttcgcaggcgctgttgctgcagtcaacgcatttcggattctgaatgaagaacaggaaagcactcatttgaatgagatttctgctgaatataagaagaaatattttgagggatgcgggaagtcgttatcttgtcatgatatttgtccgattggtctgcctgtggaagaactgcttgtaaggtcgaatgcagcggctgtttggggcaaataaaatggatgataaaagctataatgaatgtatgaagagaatcaaaaacttgattctctttttttaaaatacatacattgacaaatatctatgtatatattatattgaacatagacaatgatcaatgtgaggtgtcaatatgaatgcaatggatgtggctttgatatgcaaggctttgggcgatgcgaaccggctggaaattgtacagatgctgtcggatggagaaaagtgcgggtgtaaacttttggaaagatttaaaattacccagccaactttatcccatcatatgaagatactggtaggatgcggccttgtgaatgatcgtaaggaaggaaaatggcatcactattctttgaattgtgagacattgatgaattacaaacactttatagaatcccttacttgccttggaagcggtgacggggattgttgtaaataatttaaggagagcagatatcatgaaaaaagaatcaaattcaggaattagttttttccagcgttacctgactgtatgggtaattatctgtatgcttataggaattatgttgggacattttcttccgggaatgaaagaggcactgaactatctggaatatgcaggaatttctattccgctggcagttcttatatggattatgatctatccaatgatgatgaaggttgacttcaagagtattaaaaatatcgggaaaaacccgaaaggtttatttgttacatggattgtaaactggctagggagattccgaagagcttttgttcagatgatgaaacaataggattggtacaggaattatatggaacaaaagttaataaagggatttgttgcgttttccgctataataatctgccagcaaagaatgtgttgcctgaatatgtttgtgattataagaaacgagcagggttatttcaaagatctgcagatttagagtagttctttttttctgagagaaaaattaaaaatcgtttttggttcttctggagagtgattatagcgtttgggaaacatccggagaaaccattacctcagggtgtcggtaaagttctttatcaaagagggctttgagatgccctttccttttttatccaaatctttcctcttgtttacatatataaacctaagaaaaagcttgacgtttaaatattacaagtgtaatatttaagaaaatacgaaaaaaggagaaataaaactatatgagaaaaaagaaaagaaaaaaacacacgaagactatcacaaaaatagttttatttagcggtatattgattggtggtggaatcggtattgtaacaataatgaatcgtaatgttcctgaaaaaagactaatggaatatatgaaatatattgaaaaaggggaatatgagcaaatgtatgccatgctggatcagaaaaaaagcagcatgaacagtaaggaagaatttatagaacgaaattctaaaatatatgaaggcattgagatgtctgatctgtccataaccgatattacagtaaaaagaaaagaaaacggaaatgcggcagtttcctatacaataaatatgcagactgctgcaggaaatgtagaatttaccaacaatgcggtattttcacatgactggacaggatatcatttaatctggcaggatcagttgatttttccagagttatctgcaacggataaagttcaggtaacgttagaagaggcaaaaagaggaaatattttagacagaaatggtcgtcagctggctggagagggaactgcatcttcggtaggaattgttccgggcagaatggagaacagggaagatacaataaaaaaactggcagagtatcttggaattggagcagacgaaattgaggataagttaaaagccgattgggtaaaagcagattcttttgtaccagtagcaacaattcctaaaatacaagaggtcgatcttctgacagtgaatccggatgaaactgttctggaagaaaaagaaaagcaggacacattattgaagattccaggtattatgttatttgatgtaaaagtacgaacttattatctaaaagaagctgcctctcatctggtagggtatgtacaggcggttacagccgaggatttgcaggaacataaaggggaagggtatcgtacaaacagtgtgattggaaagacgggactggaaacgctttatgaaaaagaactaaaaggaacagatgggtgtgaaatctgtattgtaaatgcaaatggaaataaaaaaagtgttattgcatatgagcctagaaaagatggagaagatatccatactacgattgatggtgatcttcaaagtactctttatgaacaatttaaagaagacagaggatgttctgtagctttgaatccttatacaggggaagtattggcgttggtaagtacgccatcttatgataataatgattttgtacgtggaatggacaacagccagtggagtgcattaaatgaaaatgaagacaggcctttatacaaccgctttcgccagacatggtgtccaggctcaacttttaaacctgtaattgctgcaattggattaaaagtgggggcatttactgcaaatgacgattttggaaatgagggtctggcgtggcagaaagattcctcgtggggagattatacagtgactacacttcatgattatgaacctgtgatcttgaaaaatgcgcttatttattcagataatatttattttgcaaaagcagcattaaaaattggtgcggatcaactgatgcagtctctaaatcaaataggatttaatcaggaacttccatttgatattaaaatgtcagagtcccaatattctaatatggacaagatagaaacagaaatccagcttgctgacagtgggtatggacagggacagattctggtaaatcctttgcatcttgcaagcatttatacggcttttctaaatgatggaaatatgataaagccatatcttcacgcggatggtggaagcacttccagtgaaatctggataaaagatgttttttcaccacaaattgtttcggaggttatggaggggttagagggtgtagtgaataacccggaaggaactggttatggagcatgccgggaagacattagattagcaggaaaaaccggaacagcggaactgaaagctacaaaagaagatacatctggaacagaaattggctggtttacagtttttactacagatagagatacaaagaatcctattttgctcatcagtatggtagagaatgtgaaagatattggaggaagcggttatgtggtggaaaaggataaggcgatactggatgaatatcttggtaatgaataatttttacctttaaatattacaaatgtaagaggaaaatgatatgaaaaaaatttggaaaatattttggggagttatttttcttgctgtctgtagtggatgtggcataaagaaagagcagaaaaagacaattgaagatacgaaagaaaaaatttacagagagtgtgaaatgctggcagaagactatcagagcatatatgagaatgctgcgaaagaaaatgcactatatgagttgagtacaatacaaaaaagtatggattattttggaaaatatggatatgcagtaattgattcctacaatcagctggatatggttcaaagtattaaagtagatgattttttgaaaaaagcagaaaaagagaaaaatggaaaaactactatatttcaagttatagcaggggatcattttattcggtatgatctgaaaaccaaacaggggaaaatagacgttgaagtaagctcttttaaatggaaagaggatacttggcaggaaacatattatcatgagtttagagctaattcatggaaatatacagaaaacgggtatttctttatggaagaatatcatccggctggatatgatggaccgtctggatatcgggcctttcgggtagtgccgttaaataaaaaatgcagggagctgaatcgaaaatatatacttccttttggatatacacttaataaattgtttacttctaattggagtgaaaaaaattatgatggaataaatttttatgatgtttttgaccgtttactttcaatggaagaaaaaactgatgaatttaaggaaggaaagacttatgaaatcccaaaagaatcatttgaagcgatatttcaaaaatattttaatataagcgcagagatactgcagacaggaacggtatttcacacggaaacacagacatatcggtatcgaaccagaggaatcgtatatgattttgctcccacaccatatattccatatccggaagttgtttcctacatagaaaatcaagatggaacaataacactggaagtaaatgcggtatggccacaaaaagaattagatcaggcgttttgtcatagcgtaaccattcggctgttagataaagatagatttcaatatgtatccaattatgtatcaaggtcagaaatagaggttacctggtatacggaaagattatcagacgaaaagtgggaggaatgttatggagataattgatatgagtacaaaaagaaaactgaaaaagatggtgagtgttttatttattttgggatgctttttcataggaaatacaaaatgtaaaggggctgatttagaatatatttcacaggaaactgcgaattatgctgtacaagaaagaggatatgatttgccagtagatgaagtcgtgaaagaagaagctattgaagattgtaagaatgttatgaatcagatgaaagccatttatcaaaaggcggataaaggaacttcatcgaatgtagtagtttctgagacagtaatggaaaaaatgcaggaagtattaaaggaaaaaaatgtccctgttattacatcagcgccgtattcaaatatggctaattattctaaaatggaagaatttcttttcagggcagaacaggatctgtcaggagatatcgtcttatataggattaacagggatggtgggatagaaagactcaaattcaattatgatgggacagatatgtatttgttggctgcgaaagttgtttggggtatgaacgacaatccatctattgtatatgtttcgtatacaaggatagaagaatggaaatatacagaaaaaggctggtttggttatacgctatgtgttccaaaatatccggaagtatcagaagcggttgatggcagttctatgataagaattaaacctttaagtgatgaatgcagggaagtttcaaagaggtgtgtgtatttgcttggatatcaggggaataatcttttatgttctgattgggatagatctgatatggaagggttagattataatggtttatatgaatatttatatcgaatgaaatacggggagagatatgagttttcaggtaactcaagtggaattccggcagaagagtttgaaaatctgataatggagtttttgccgataacagcggagcaaattaaaaaatgggcagtatttgattcggaacatcaaacttatgactgggaacgattaggttgtttaaattatagccctacttattttggaacatctttaccggaggtcgttgaaataagagatatcggagagggaaacaatgtgctggttgttgatgctgtatgtgatacatttatatgtaatgataccgttattacaagtgagctgactgttaagttcaacgatgataagagttttaaatatatggggaataaaattctgaataatggtacgaaagaagttcccaaatatcaatatagaataaaaagaaagaactgataacaactatcagccctttcatatttgttaattccatatatgtaatttttttaagatatcagaagtgatttcaaatgcttttttgccagttgcattagaatcactttggatattggttgcaaaataatagctgttatcggaagtttctacatatccgataaaccagccgttgatatcctgtccgttgacacgaccggttccagtttttccgtagaaattaccattaggtgtactggcaatttttatagcatttttaacagaaaatacattttgggaatttagatggaattcatttgtgttaaattttttcaataatgttacttgctctaaaggcgagatttttaatgaaaaatcggaccagtataaatccagatttgaactggttgtctggtttccatattctattttattcaaaaattcctggactctgttaattccgagctgcgaatcaattgcctggaaataccagttaacggaattttgcatagcagagtttaaatcctgatcagcttcccaggatggaaaaggaaaggcatcaccattccatgtcatggaagagtgttctggtgtgatgattccggattccaaccctaataatgcatcgtatattttgtaggtagactctggcggaatacgtttggtggcttcttcaagatcgtatattttccaggaatccaaattattgtcatacaaaacaaatgatccatcatatgttccaaatgtttcggatatatctaacagggagatatttttgtctgtattactaaaatgatatacgctttgagtagaggcatcaatggataaaatgggtgtacatccaataaaaacagcactaatgaccagataaattatcaatgctctcattttttgataaagagtttctttcctaaaaacggcgatgttgagaatacgtcgtttcatctgcctgaaatttccggacattccaactgccagtggagaggaaaaagaggatattttttctgcaaaattaatcagtgtagttccataagcttggtattcatcagcagaaatcatctgcaatacagcagaatcacaggctatttcacggtcacagagaatttcttttaaagtgtaccaaacaaaagggttaaaccagtagagtatattacttatgaccatgaggaagccaataaatgtatctttgtgacggtaatgctgtaattcgtgtagcagcataaaacgcatatcatcaggattcagttcggaaattaaatggatgggaatgtaaattctgggatgtattattccgattaaaactggtgattttaaaaatgcagtactgtagactgatactgggtgagagattttaagttcctttaaacaattgtaataaatagtttttacctgctgattttgaagcgggagagcagatctttttatggaacgtacatagtttaatgaatgaagggtgaggactgacataatcataacacccgttatccatattagaaagagtatggtattcaagcctccagaaaattgactactgatggaaactgaaaaatcattcacctggtttaacaaaatattttgtgtattactggtaagttcggatagcgtgtcggtaccagagttaagtcctgagtcagtttgaaaaaaatgtaaccatgaaaaaagttgtgagccatgaatctgtacaggaaaaaatggcacggcaagtagtaaaaataaaagaaaacagagatggtactgtgtagccgcagataaatattttttcagaagtttttttgttccgattattacaagtgtaaaaatacatatgaagatattactgattaaaaagtggataatccagttgctcattcaaaacctcctatttctgatgttttgataataaatggcgtaagttatcaatttctgttgaagagagcttatcgtcttcaaggtaagaagccagcatagaagaaagatttccattataatatcgctttaaaaaagaattgctttcctggcgtatatattcatcttcttggactaatggagtatagacaaatacccggctttgtttttcgtaggaaagagcttttttggaaacaagtctcttgataagagtttgaattgtttttggactccagctggtagttagagtaagtttttctgtaatttcatttgtattgatgggagcatatttccatacaattttcataacttcaaattcggcttctgaaatttggggtagtgacataataaaatcctcctgctaaatcctacatatgtaataaatatattatattacttgtagaagaaaaaagtcaaatggcagatgatatatagaatataaaattaataatgtagaggcaataaaggtgaaaaagatagaaattattgagagaatcacagatgctaatggaagcataagtgaaaacatattgactagctgggaacataaaaaccaattcataccggaaattataaggtttggagaattaaaaatatatctacaggaacgaattgttaaaaagaatgatagtgatgttcatctttcaaaatatgaatatgatattttacttcttttagcgaaaagtccaggtagaatatttggaaaagaaatggtttatgatctggtatggaatgaaccttattccggtgattataatgtggttatgcgacatatctgcaatatcagagaaaaaatagaagatgatcctggacaaccattatatatacaaacagtacgaggtgtaggatatcggtttaacgggaatttaggcagcgagtgaaatcgctgcctattattatggttttacaaagaagggagttggttatgagaagatctttgtatttcaggagcatcctgtttgagatatttggacaggttttgatgtatcaattccaactcttttatttcttgcttaaaagaaacgtattgagtatttagtgattcctttctggaaataagatctgcaatttgctcttgtaacttattggaattaagatgcttcagatccatgccattttcctgtaaaatatgttcagcacccgcgaaaagaataatttgagattcatatttacggaaataacgatctggatctttggagcttttataatggtcgtcgtaaattttatttttctgatattgttcggcatattttagcatttctcgaagatggcgtatctgagactcgagagaaacaacagaggtatttacctctttttgctgcatatgtaacaaggctatgcggtcttcaagtcctgaaaaattatgtagattatgtgtgaacatcttgttatattcagcagagacaatttttaaattttccttatttgcccatttctgaagtccaatgtttcctgctatattgggagtgttggtgtctattaacttattacgaacagaaggaacagtatctctttagtgattttgggatttttatacacatttgccttaattgcttatgcaggcggtgaagtggacgctatcgaattttcaacatatgaaaatatttggactttaataaatgctttgcaaaccgtagcttacgctgttttaatttctgttatgttttcaacatttatcatcaaagagtatgctggaaaacttaatttacttttgtttacttatcctgttgataaatctacccttttgaaagcgaaagtattattagtagcttttagtggaattggtggtatgcttctcggaagtgctttgatttttttaattttctttattactgaacgcatattccctctagttcccgatactttttcttttggaaatatcattaaaatatggagtgagttattattatgttctgtgtacgctttatgcgttggcatagtagctacaaaaataggatttataaaaatgtctgtgcagacaacgattgtcagtgcaattattatagctagttgttcagcaaatgttatttctactatgagttatactaattttccttttctctttttgtgggggattatggctataatttccataataagttattgtaatattgtacacaaaacaattcgtatggatatttaataaaaacaaagtttattatgtcttgaataatgattttagtagcgtatttgaatttcagttttaatactgatgaatttataaatttgcaattatgataagaaaggttaaatatgataagtctaagaaaacgagatataaaaaaggcattaaaagctggtgcaaaggctggcggtgtatcattggctgatgttcgggctgatattgaagcaacgattgatgaagctatggatagtgccgacccagaggtgcagacaaatttcaaaaagtattttggaaataaacgccctacaccagaagaatatatttacaagacaatgagcgacgaagtgtatcaagcctttcaaaacatactgaaacaccgcaggaaacagaagaaccttgtgattgacggatatagtgtttttttattcatcaaccgcaatggcaatccacaagtggcagtaaattatgaagctgtattccgaaaacttgtagacaagtacaacagcaagcatgaagaaccattaccgaagattacacctcatggtcgagttataataaggacaagttagaaaactccagtaaatacaaggggttgcactaatttagtccttatttttaatttcctgaaaagggaaaaataaagcagcgctgtcattccagaatatgaattattacagattcagactggaaatggatttgtgtaagacaagagtaaaaacaacagaattattgtaattataggactgaattagctcgcacggaatatagattccggatgtctaattcagtcctctttttgattgatgacgatgaaaggtgatgaaaaatggctagaattatttctattgtaaaccaaaaagggggaacgggaaaatccgcatgtacagctaatttagcagtaggattagcacaaaagaatatgaaagtgttgattgtagatgccgatccacagtctgatgtatccgcaggatttggatatcgtgattgtgatgacagtaatgaaacacttactgctcttatggatgctgtaatgaaagatgaagatattccttccgaatgttttatcagacatcaggcagaggggatagacattatctgttctaacattggactggcaggtacggaagtacagttggtaaatgcaatgagtagagaatatgtattgaaacagattttatatggtatcaaagatcaatatgatgtagtcatcattgattgtatgccatcattgggaatgattacgattaatgcgctggctgcatcagatgaagtcctcattccagttgaagcatcctacctgccaatcaaaggattgcagcagttgttaaaaacaatcggtaaggtccgtaagcagattaatccgaagctgcaagtcggaggtattttgtttacgatggtcgatgctcatacgaatgatgccagaaataacatggaacttctcagaaatgtatatggaagtcaaattcatatctttgataattatattccattttctgtaagaatgaaggaagcagtcagagaaggacagagtattttctcttatgatccgaaaggcaaagctacagaagcttatcggagagtgacggaggaggtgctgaaagatgccatctaaaaaaagagcaactcccatttccttacagccacttgatggtatgcagataaaaaaagaagattataagctggtctatgttggggaattatcgggaaatatgtcactggatgatatttttgaaaggttcaacattgatagaccggaagatttccgtgggcattccctgtctgtcagtgatatcatagttctgaatgacggggaaaaagtaaccgctcattttgtagacagtatcagttttgaacagctggattctttcctgaatctggaagaacaggttcttagtgaactggcatatgaggtaggagaacgttactttgctattcagagaacagaagaaggatatgattattcgttttacgatgaagattttcgtctgatggatggtggcgtctatgaaaatgatcaaatttctattgaagaagcggcagaggaacttctggaagacgaaggctggactggagaacgcatccgtggagattatgatcagttgatggaaaaagtagaagaaatggatgaagttgtaatggcagagattcagaaaagccagggcgaatataagcctttggcaaaggtggaggaactggaagaggcgaattataacatgattgataacgtccttaataatatgccaccgaagaaagagccttatctggaatatttcgccacagaatgtgatgagttccatgatatgggagcttatgaaaaaagtaccgatgttaatcagattgctgcggtctatgaaaaatatagggagaatcctaaaactgcgtatctgggatgctcaatgggaattatttatcgtgatccggaagacagttactatgatgaagccgaatttgcgatcgttaaagggaataccgtattcggaaatctgatggatgatgttcgattttatggagaacttgcactggtacgggaagggatcgagaaaattcatgaagcattgccggactacaagtatgtaccgatgagggatgttcgagaagcaatgtatcctgagaaaatgaccacagaacagctggcagaggcactggatgagattgcagaagcttttgatccgtatgagtatcgagataatgtggagaggggagaaaatacggtgcaggaagtaatgctggatttgagaagtggaaatattcattcctatatttcatatctgaaggatattgtagacgaagaatgcgatctgtctgttcgtgcaggagtattgattgaaagactgaaagcctatgaacctgaacttctaaaggatatggaaccaatggtgtatgtaaactattgtgaagaaagtgatctcatgaatccaagatgtcagaagctgtctgagctggatgcaaaaacagcagaaatggataaagaatggtatgcaaaacgtgatccgaagacagaggaacctacaaaaattgcaaagatatatgtgactgtatattatgcggaaaaaggtgaacagatgctgcatcattttaagaagtcaatggatattggaaatggacatggcggtattgtgagtcagttgaagtatgataatgaaatgaagcttacagatgagtattggatcaattaccagaaaggcaaaggaagtgaagagttccaaaagtatatggaagatctgacagacatgcagaatcatgtgcttccgtatctgcagagtttttgcaatctggaggaaaaaggtgtgaaggagagacgagaacagcagatagcagaaagatatgaaggaagagcagatgagagggtaacaagtaccgaagcgaatgaagttgttaaggatgtaggaaaaacagatagaaaaccggcacagcagaagcaggcggtagatggaaaagataagaaattatccattcatgaacggcttgagatcaataagaggattattcaagaaaagcagggaaaagataaaacggagagaggagttgatttgggtgtaaggacagtgtagaataagcagaacgagtcggaggtcgtggatgataacgtggcttccggctttattgcgtattgtcggaagaattataaatggtataatgaatgtaaatgcgataaaagaatgtcgcctgttatgcgacttccaaatgagaaaagtgtgttattctgagatcaaacaagaggctaatagagtcaggagggtgacattatgagtaaaaaaggatatagcagaccaggattctttggatccataaaccattatgatgcaaacggaaaaaagtaggcgagagcagaccaggattctttggtggtatgaacgactatgatgcaaatggaaagaaaatcggacatagttcgccttccttttttggtggtatgaatcattatgacaataacgggcataaagtaggtgagagtcgaccaggattctttggcggtttaaaccattatgatgacaaggggcataagcgggggcatagcaatccaggatttttaggtggattcaatcattacggttaaaactgcacagagagcagcacaagcggcaagggctgcggcaaaagccgccgtggttacggtaaaggcgattgccaaagcgaccgcacttgccattaaagcgattattgccggaacgaaagccttgattgccgctatcgccgcaggcggctgggtggcggttttggttattatcgtgatttgcctgattggtatgatcctcggctcagtatttggcattttcttctcagacgaagattccggcactggaatgagtatgcagaccgttgtgcaggaaatcaataccgaatacgataccaagctgcaagaggaaaagaactcggtatcctatgatgttcttgaaatgagtggcagcagagccgtttggaaagaggtgcttgccgtttactctgtaaaaacgaatacggatcaagataacccccaagaggttgccacaatggacgatggcaaaaagcaactcttaaaagacatcttttgggagatgaatcaaatatcttcccgaacagagagcaagaccgaaacagttattaccgaaaccgatgacggacacggtaatatcgtggaaactgaaagcacggtcacacaaacctatctgtatattaccgtcagccacaagactgccgaggaaatggcggcgcaatatggttttaacgaagaacagaaaggctacctcgctgaactgcttgcagatgaaaacaattacctttggtcacaggtgctttacggcattacaggcggcgacggacagatcgtgaccgttgcactctctctggttggcaatgtgggcggtcagccgtattggtcgtggtacggttttaactcccgtgtagaatggtgtgcttgctttgtatcttggtgtgccaacgagtgcggctatatcgacgctggagttatcccaaaatatgcaggctgtgtcaacggagtacaatggtttaaggatcgtggacaatggctggatggcagcgccgagcctgcccccggaatgattattttcttcgattgggcagacgaaagtggtcaggatggattatccgaccatacgggtattgttcaaaaggtcgaaaacggcaaggtttatacggtcgagggcaactccggcgacagttgccgagtcaatgagtattctatcggttattacgagattcttggctacggcgcacctgcctattaaaatacacaagccgcctgcattttgcaggcggttggattacatatcagaaagatattgtgccggtttgaaaactaaaagtctcaaaatacagacttaataattgcgatttcactctcaaagtgctataatacaaactatatttgggtggaggtgcggaaatgaaagtacggtacaacaaactttggaaacttctgattgacaagggaatgaaaaagagtcaattacgagaagcggtcggggcaagcaaaagtacatttgcgaaactcggaaaaaatgaaaatgttacccttcccgtgctgttgaatatatgcgaatacttagagtgtgattttggcgacataatggaagccgtacccgaaaatgaggtgtaggatcaatgaacaagaagattttaattgtggatgacgaaaaagaaatcgttgatctgcttgaagtgtatttgagtaacgatggttattcagtatataaatgttataatgggttagaggcgatgaaatgtatcaaacagtcgcagattgatttagcgatacttgatattatgctgccggatattgatggttttcgactttgccaaaaaattcgggaaaagttttacttccctattattatgcttaccgccaaaattgaggatagcgacaagattatggggcttacgattggtgcggatgattatataacgaaaccgtttaatcctttagaggttgtggcaagagtaaagacgcaattaaggcgttatcagagctataacagtcctaatttgagccaatccgaagaaaaagacgagtatgacatcagaggtctactgataaacagagtcagccacaagtgctacttgtatggcaaagaaatagccttgactccgttggagttttctattctgtggtatctgtgcgaacatcagggtaaagttgtcgcctcggaggaattatttgaagccgtgtggaaagaaaagtatcttcgcaacagtaacaatacggtaatggcgcacattgggcggcttcgggaaaaattgaatgaaccttcaaaaaatccgaagttcattaaaactgtttggggggtagggtatgaaattgaataaaaaagaaaaaaactatctgctctctaccttgttcaaagggtatgtaattcaatgtgcgatttgctctgtgcttatttttggcggtacttttcttttaggaattatggcagaggaaattctccgcaagtatgttttgtattattacttgtattacagaacagtatatctttatatagtggctgtaatcgtgtggggtggctgtattatatacatgacatacctacttttgaaaaaagtagtcgcctatgtgtacgaggtacaggctgcgacaggaaaaatgttcgatcagaatgtcagttacattgaaatgtccccggagttgagtgaaatcgccgctaacatcaatcagttaaaacaagaggctgaaagtaatgcaaggcttgcaaaagaaaatgagcagcgaaaaaatgacctgattatgtatcttgcacacgatttgaaaacaccgctttcttctgtaatcgggtatcttactttactgcgtgatgagtcgcaaatctcaaaggaacttcgagaaaagtacctttcaatcactcttggtaaggcagaacggttagaggatctgattaacgagtttttcgagataacacgattcaatatatacgatattacattacaatacacgaaaatcaatttaactcgcctgctggagcaacttgtatatgaatttaagcctatgctcaaatcaaagaatttgcaatgtaatctttgtgttgatgatgatataatgcttcgatgtgacgcagacaaaattcagcgtgtttttgataaccttttgagaaatgcggttatctacagttttgaaaatacggatatcacgatcagcgcacaatgtcaggaagatacggtcagcattattttttgtaaccacggcgatactctgccggaagaaaagttaaacaggattttcgagcagttttatcggcttgacgcagcgagaagtacaagcagtggaggagctggattaggtttggcgattgcaaagcagattgttgaactacacaatggtacaatcgttgcagagagccaagaggatcaaaacaagttttcaattactttgccgttggcgtaggaaaattgtaagaatttgcatagaaaaaaagaggaataccttacgagcaatcaagaaaatacgggcttctgttttggtacaataaaagtatcaagatagaggctcgtattttttgtgatacagcataaggaggaatgatgaagttgctaagaaaacaaatgctgctatgttctattttgtttcttgtatttacgctatctgcctgctctgcaattgggcagacagacgaaaacaatcttacagatagcgcaacatccgcagaaaaaacggtatcagttgtacgagggacaattactccaaccgtttcaacgcaaacgactattgttccggcagtaccgtttattatttcctcacccgaaaatggcatatttaatacagcggtagaattagaagaaaaaatcactgccgggcaaattattggaactgtgaacggcaaagaattgaaatctccggtggatggtacaattacctctattgccccatccaatgaaagcgtaccgagtaattatcccgtagcgatagtgcattatacaggatttgccctcaatgtagaggcagataattttttgagtaccttaccggagtatgcagagttgaaagcaaaatttcaagtatatgatggtgtaggaccaaccgatatgattgccgtggtgtcgcctgccgcagatgaaaatgcgtttacgggaatcgtgccgcaagagggcattctgcaatgcttgatcagtcaaacagtcgatgtgaaatcggggcaaagtgcaacggtagtcataacggcgacaacgagaaatgatgtccttatattgccgctgtcggtaatagcgggtagacaagggacgggattggttactgtaattactccgaatggagaaagagtggaaacaaaagtgacattgggtgtgacagacggagccaatatagaaatactgtccggcttagaggagggcgatgtagtttctgctactccgccaaaccttgatccgagggggatttgataaaatgaaaggaatttccgaaaagactttaatcaaaataaaggatttgaaagcaagcgtcaaattgaataatggcgatatgctgacaacagtaaccaacgctaatatggaattgcaacgagggcgcagttatgccattgtcggaaagtccggctcaggcaaaacaagccttatatccattattggcttgttaaatcgggaatatgagggcgagtacctttatgatggtatatctatttctgctttgaaagaccgtgatctgtctatactgcgagccaataatatcggatttgtatttcagaactactctctgattaagcacttgcgggtatgggaaaatatcgaattacccctactctatgccaaaaagtcgtttaccgccaaacagcgtcacgagataattacaggcttgctaaaaagtgtcggcttagaaagcaaggaaaatgattacccaatcaatttgtccggcggtgaacaacaaagagttgcaatcgcaagggcgcttgcagtatctccggaagccattttatgtgatgagcctacgggagcgttggataaaaagacgggaacgcagattatggaactgttgcacagcgtcgtaaaagaaaatggaattatgctgctgttggttacgcacgatcctgatattgcagatacctgtgatacgatttttgaaatggatggagggaggataacttgtgctaaaaatgatacttaaagaccttcgtctgtctccacttagaagtattctgacaagtgtttcaatgcttgtaggcattatcgcaatgcttggatcggtattagttggtacgcttggacgggagtatttgattttcgtaaacgcacaggtatatggctggtcacctacttactcattcgtgataacggaatccgattttcacgatagaaataaaatggaacaattattccagagatttgaagccattgatgatgtagccgctgttactttttctatgggagaagatattcgatttgcaccaatgaaagatttaacgccaataccgccgaatgatgtttaccaaaacctgatggcttttgatttagtttgcaccacggaggcatatagtcaagtctataatcttccaatgacatccggtagatggttagagccttcgagtgagggcggctcgcttgaagtggtcataaacaaagaagctaaaaactattttaatgattcgccctatgctgcaggaaatgtaaaaagcacactttcgttaaccccattcaatattgtcggagtagtaaacgatggcagggattttccgactatctatgcggattctgcggcgatcctcaatttcgcaccagcaatgtggcaagtacaaaatgcaaatgtgtattggcatcccacaacaggactgacaatcgaacagatacattctgcccttggcgacattttgactgataccattggcggttactgggaaagtgctgggcggagtgatattggagatacctatgattcggtattgtccatactgcaattagggcttttggttacttcgcttttgttgctgtttgtttccgtattagggcagatcaatatcggactatcttcattggaacagcgcacacatgagttgctgatccgcagagcgataggtgcttcacgaacaaatattgtggcattggttttaggctcacagttgattttatcaatattcgtttgccttgcagctattttgatttcgctgattttggtgcattgtattggagcgttgctccctgtggattccccggtgggaacaccgagttatccaatcagcgttgctgttgttgcagttgctgtgtctgtgcttacagcattattgggcggattattaccagcattgaaagcagcaaaattagagcctgcattggctcttagataataaaactcaattcaaggaggaaacaaaatgaaacgaacaatctcaaaatccgaaagaccgtacagactgttattgtgtgttatgatttctttgctggtgattatgctggcaggctgctccacttcttcggactccgacacaaacacaagaggtttcacggactttgctaccattgaagaagaatacctaacgaccattgagagtttgaattggccggagggctttacgccgcctgatgctttggaaggcgaagatacgggagcgtcttttcagataggatatggcgatacaagagcatctaacctttgggaatattcttggatgcaggaatggcttgatacttacaatacgaattcggaaagggcggcaaaagccttagctgaactcgaaaaagcctttgatatgccttatatgggaacagatcgctgtgatgacgccacacgcaaatatcttcgtgataatattgataaagctaagttgggagatccgtctggatttacagagtgtattcaggcaaattatgccgattaaaaatggcacataggagttttggtgttgggaggtgagcacatatatgcagagaaaacgccgtaagaaaaaacgatttggagtatttttgtttttgcttgtagtttgtatcggcataggtataatgtttgtgccgtgggcaatgcagccggaaaatttcagagaggtaaagaataaaataaatggttttctctacaaagaagattttcctgactcttataatgcaaaatcgctgattttggtggattgttctgatgatgaaatatttgtttcaaaaaacgagaacgagccacaaattcctgcaagtttagccaagctgtttgttattgagtatgcgtcaactttagcagaccttgatagtatcgttgttgcagactatggtgctatttcactcacgaaacctggctcgtctgttgctcaaatcaaggaaaaagaatactttttacacaatctatttgcggcaatgttagtaccgtcagggaatgacgcagcttatgtggttgctgattattgtggaggattactttcgccgcaagcagaaagctgtcaagagcgtgtgaggattttcatggagaacttaaacctgcatttgcaacagcaggggtacttagacacagttttatatgatccgagtggttttgatatggaggcacttaccaccactttagatttgaaagaagtagtatatcggttgttggaatactcgtggtttagagaaattgtatctcaaaacacttatacggcaacactgcctgatggcagtacacaaatatggcagaatacaaacgccttccttgatccgacatccgaatattacaacgaaaatgtatgcggaattaagactagctctctgtctgacgactataacttgattgtgctttatcagcagcacaggcgattgctacttgtgatgagcagaaattatcaagaggggatcaggtgcagttccagaggtttgacacgatcaaaaagaaacactggagccctacgacagtatcggcaatcgtccgggatgagatttatattggaaccagaatctggggcaaaacacgttgcagtatgcatacgggccataaagcagttctgaatgatgaaacagaatgggttcgcctggaaaatcatcatacggcaattatagacagggaattgtttgaaaaagcaaatgaaatgcatccgaaaaagaagagaagtgttgcagaatcacgcaccaattttactctggaaagacgtaaaaaacagccggccttgctgatatgtgccaactgtgggcattctctgttaaaagaaacagagcatctgctgaaatgttcagatgccagaaccaatggtgatcctgtgtgccgaagtctggtgattcgtagggaaccgatggaggagaatatccttgggcttgtccgtcagtatgcagcgtcaatgttgaaaaaaggaaagaaagtatcttccaaaagacaatgtgaatacaaagagatcaatactacagaattgcaaaaacagagccgacagttgacctcggaaaagatgaaactctatgatgattacaaagatggtcgtatagatcgtgattcgtataagcagagagctgaaaagataagtgtacagctggatgaaataaaacgaaagatagaagatgcgaagaatagtaaaaagcttcttgaacaaaatgaactttctgataaaataaaactaaaagatttcttgggaattcagaagttcgatacagagaagctgcgtgaggttatcaaggtgatccgtgttcatagtcaggatgaaattgaaatcgaatggaattttgacgatattttttcagaacagagataacttgagcaggacaagaatgacttatcaaaagataataaaggtgctgggactacctgatggaagcgtcagatagtcttcggcagaaaaaaataaaattttttttgtcctatacttgacacatccacatgtcatgcgtcatacattctgcacaaggttagccaacgcaggaatgaacccaaaagcactgcaatatgtcatgggacattccaatatcacaatcacattgaacctctacactcacgcttcacttgaaacggtaaaatcagaattacagcgatttgtagcttagtagtaaaaggctggattactaccgatttactacttttgaaagcagaatgaagcggaaatatgcggagttaagtatggtatcgacctattgaaaagtgaaaaaaagtccgtaaatacgggatattccagcattcgcggacttatggatagataaagaaaaaagatttagataaatagaatctaaaattaataatgtagaggcaataaaggtgaaaaagatagaaattattgagagaatcacagatgctaatggaagcataagtgaaaacatattgactagctgggaacataaaaaccaattcataccggaaattataaggtttggagaattaaaaatatatctacaggaacgaattgttaaaaagaatgatagtgatgttcatctttcaaaatatgaatatgatattttacttcttttagcgaaaagtccaggtagaatatttggaaaagaaatggtttatgatctggtatggaatgaaccttattccggtgattataatgtggttatgcgacatatctgcaatatcagagaaaaaatagaagatgatcctggacaaccattatatatacaaacagtacgaggtgtaggatatcggtttaacgggaatttaggcagcaagtgaaatcgctgcctattattatggttttacaaagaagggagtttgttatgagaagatctttgtatttcaggagcatcctgtttgagatatttggacagattttgatgtatcaattccaactcttttatttcttgcttaaaagaaacatattgagtatttagtgattttttttgggaaataagatctgaaagttgctcctgtaacttattggtattaagatgcttcaggtccatgccattttcctgtaaaatatgttcagcaccagcgaaaagaataatttgagattcatatttacggaaataacgatccggatctttggaacttttataatggtcatcgtaaattttatttttctgatattgtttggcatattttagcatttctcgaagatgacgtatctgagactcgagagaaacaacagaggtatttacctctttttgctgcatatgtaacaaggctatgcggtcttcaagttctgaaaaattatgtagattatgtgtgagcatcttgttatattcagcagagacaatttttaaattttccttatttgcccatttctgaagtccaatgtttcctgctatattgggagtgttggtgtctattaacttattacgaacagaaggaacagtagttctgtgaagcttattattaatgcgttctttgatacgttccttagtaaagttttttcctaaagatttagcacttccacgcactggacgggacatatcgggagaacgaaaggtaatgtattttctgctgttttcgccaaattctgcgttttttatttcatatcctttagcttccataaatgtaagaaattctgaataagtggaaacgattcggattgtctggtttatatcttttcgcagctgcgtttttttactggattcagatttatttgcagcccattcattgtatttcattccctttttaccatttggcataattgtggacaggttatgttcctggcataaagtgtcgctgagatttcgtattttccagtaattctttttacagtcatggtaatgagaaaaagtgatgttatctgcagaacagaaaattaaatggttatgtacatgacctttatcagtgtgtgttgtcagaacataggagtattttccctccagcaagcgatccgcaagttctctgccgatttgatgggcttcttcataggaaacttcaccaggggaaaatgcctgaatcagatgaaatgccttatttgtattgtgcggatctctgcagtcatgtgtatgatccaaagtgtatttaaagtcaagagcggctgtttcgggagagcaggcaaaggaagaaatatatagattctggtcagttttatctggattgcagatgtattctattgctttatcaacggttgttttgataccatggatttttgtaactgccatattttttccattaactcctttatatcgtccaggtccttttggtaaactgtattgctactgtttatacgatgggtgatctgattcaaattgctgctgatattgcccagcagggtattcatttttcggatatgagagtagtctacttcatatacaaatccatataagatcattttccgtagaaaggcagatttgcttttcatcctggaaagacgatatttttcttctaaaatgtattgttcgtcatcattcaaataaaattgtacgggatgaattctggtacgtttgctcattgaaatcctccaattcgtttttttctataaaaaagagtacaaaaaaactgtctaaccagttcggctatgacagttatattacttggctgtatgatgttttggacagatgtgtctacagtttattttaacaggagtaggcagaagcgtcaaattaagaaattataaaatatgagagggccagggatactccctgatacatttttacaaaataaaccgaaggggaaattttgtaaaatgagccaggtgtcatgacactggcagtgcttgcttcttttggggtgtagcctgcaaagcaggctatgcaaaagctataaaacataaatagaactgtgagaagtggttgagaatataatcctgatagcgtataatcagagcaagaaatcgtaagtgagggataaatttggaacgtgaagaaatttttcaatatgtgaaagagcaatatggaacggaaccggaatatttatggaaaaaagatcctgattctgcggtgcttcgacataaaaatggaaaatggtatgctataattatggcagtggaaaagaaaacactgggattagaagaagatggaaaaattaatatcctagatgtaaaatgtgatcctgatctggttgggatgattattcaaacgtatggatttttaccggggtatcatatgaataagcggcactggattacgattcttctggatgattctgtcagtgaagctaagacactggattttctggatatgagttatgatttaattgacagtgggaagtaattaaaattaaaaaggaagcctttcagaaaaatctctgatcggctcccaggtatttattctggatatgtataagttgatctttgcaataggatattttcccaatctcgttcatggcgcagcactcggagaatatgaatctcttttgtttcttccattataatataaaaaataatagatggcggaaaagatcttttatgtatggaatatcctctgtacagaatttgagttcggggaaaggcagtactgaactgacttaaattctgcatttgttctttcagatcagattgaaaacggtcagcacgttgctggccgaattcttcttcaatataatctgcaatgtctgtgacatcgtaaattgcttcccaggttaaaataattttatattcttgcatttcttcgtgcatcccttaattctgtgattttgcgaaaagcatcttccagtggcaattcacgaccagcttccatatcatcaattccccggtctaacatgcggagaagatgattgttttcctggtttttatcggttgtagggactttttttgttaattccataaaatcactccaatcatacggtttataaatagtgtatgttgttcggaagtatctatccatagtttagcatataattggaggcaatacaattaaattattttgcaggagcgtccgtcagaccgagaagatattcgcaggattgccagatcattaaaatcatatcctgcaagttgtaatttggcagcgagcgttttctgagtaagattatgagcctttcgtaattcttttacccgttgtcctattctgtttttactgttcgtttttttatcccaataaataatcattctgatcctcgaaaatttctaaagatgaagtattattattgattttaaggaaaaatattgttactatacttctaaagatgaagttttggaaagtctatttgatttttgaataattgcgcgtcgcattctcgttactttagagcgtagcgggcaatcttgacagaatcagctttgtcggacttgattttgcgaagagaatcgttattaaaatctttgaccaacttgggattaacagcactgacaaagagatctgctgctgaaagctggtgagcaagtgcttcgtagtagcggccagtatgttccattacaacccgggattcaccttcgatagaatgaataagtttaataagtgaatggatatcactggatgtgtgcttaatctcaaaaggagaggatacaatctccccaaatggtctcagaattgtaaccatacttttaccttttgaaacatcgatacctactgcgttcataaatttatcactccttaaaaaatattacaatggataaataccagttttactcattacctgttcaaactactgtgtgtgacacgaatgcacctaatgtgattcaacctgcataaaacgaacactgtgaatgaggagccggttatcagtctaaagtacggacgcgaggtccaagtgatgaagtcgatataccattgcatcctacattctaacagtttaagtaatgagatggataaatccttactggaagtaaggggattacccataaatatattgtagtagtgatgagttagacgcgcaaattttttacccaaagaaagaacacatgtttacttctggcactatatgtgctaaaatatagccatgggtagtagaaaaaacaacagaatctgagaaaagagttatcagggaaaaataaaaatgcagataatatccagttatggtgtagaattacgaaaacagaatatcccgatccgccagacattggagatctatcgttctgctgtcagctatctgattgggatttatgtgcaggtatggaaagaattagcagaaatcccggatgcaaagaggcgttttaatgctgcagaacatctggtacatactacgaagaaaaaccatgcctgttttgattttgatatccggttcccaaagatgccttcctatctgcgcagatctgccatccagcatgcattggggacagtatcctcttataaaacacggctggatctatgggaaaagatcgacggaaagagcgggaaaccaaagcttgtatatgaaaatcacgccatgccggtcttctaccgtgatgtcatgtatcgtgaaggcgcggaagggaaagacgaagcatacctgaaactctatgacggtcatgactggaaatggtcctgtgtacgtctggatcatacggatatggaatatctgagaaaatgctggtcagggaaaaaggcatctgccccgactctggaaaagagacaccagaagtattttttgcgtttttcctataaagaggaagtaacacttaccaaaacacctgtgaaagaacagatcatctgcagcgtggacttagggatcaataccgatgcagtctgtacgatcatgcgggcagacggaactgtcctgggaagaagattcatagatcatcccagtgaaaaagaccggatgtaccgcacactgggacggatccgcagattccagagggaacatggctctgcgcagacacagggaagatgggcatatacgaaacgtctgaacacagaactgggtaaaaagattgcaggtgcgattgtaagatatgcggaagaaaaccatgcagatgtgatcgtgttcgagtatctggagatgcaggggaagatatcgggaaagaaaaaacagaaactgcacctgtggagaaaaagagatatccagaagtgttgtgaacatcaggcacacaggaaagggatgcgggtatccaggatctgcgcatggaataccagcagattggcttatgatggttccggggcggtaacacgtgactgggaaaatcacagcctctgtactttccagacaggaaaacgatataattgtgacctgtcagcatcctataatataggggcgagatattttataagggaacttttaaaaccccttccggcaacggaaaggtctttactggaggcaaaagtccctcctgtaaagcgtagaacctcatgtgtttatgctgacttaagagaacttcatctgcaaatggagatcttaaaagtagcataaacacaggcagatatacagcggattacctgtaatgtgggaacctgccgtatccggcatggaaaaagcacataactgtgcagacctaagttacaggcgtatccgccgatattcagtctgacgcctaaagcgtctggaagcacgtgactttagccatgtgaggttcacgattatcggaaaatacctgtaaacagcgtaaatacagcatttcaaggagttttaagcaatgataagagtgttatttgtctgccacggcaatatactggcaactctctaaaaagtcttgatttatcggggaaagggaagcttcacagttctgttttagaccaggtttagaccatttgaaatgtgtagaaaataacgaaaaaaacatgcagatggggagccttgttgcaaatatactcatatagaaaattacacaacggagataatttttgagcggaaaaatcatccggtgatgtgtggaaatgtatccatacgtcaccggatgttttacgtttcgggatttgattcctgatcgcgtttcatggcttcatcgattgctcgattgataaaggcagtagcactttcacccatcttttctgcgtggtcttttatgatggcacgcttctctggggtgacacgaaccttaatttcaacgaaacggtcattatattttttgttcgctcttctgcgagcttcggttaagcccttataggaaccatttttctcttcactcatgacagcctccaggatgtgtattggcagatatgcctgtaaagagtatagcacagattgatacataagactatgtaagattttcaaaaaataacatttgattggaaaaggagacaagcttatgaaaaatcagaagattagaagcatgaaggttcatgaacagagcggatataactacaaggcaacacctaccatcattcttaaagggcagtggcttaaggaaatgggatttgagattggtgattacatcagtgtcagctgtgaggatgggaagctgattattactccggatgcagaaaaggctgcaatggcaaaggcagaaacggaattcatggagaaggaaatgaagaagctccagaagcgtttccaggcagagaaggaacagctccatgctcagtttgtggctgaaagtagcactgaatataacggaagagaggtgcagtaattatgggaaagattattgttatcggttcacaaaaaggtggcgtgggtaaaaccacgaccacacttaacctggcttattctctgaaggaactgggcaagaaggtgctgacggtagattttgatagtcaggcaaatctgactacctgttacggagtagaggataccggagccttggaatatacgattggccatctgatgatggctcagatggaagaagaggtgccagagagctttgaggattatatccagagtagagagggcgtagactatattccatcatccatttatctgtctgtggtggatgcaaagcttagaacagaaatgggtgcagagaggatgctggcagaggtcctggaagcgttgaagagcagatatgattacatactgattgatacctgcccatccttgggaatgcttaccatcaatgcattggctgcggcagatgaggtgattattacggtaaatcctcagcttcttgcgatgatgggattggaggatttcctaagaactgtggcaaagattaaaaagcgaatcaatccgaaggtggagattgcaggcattctcttaactatgtgtgagagtagaaccactctttgtaaggttctgacagaggaagtgaccggaagcttccagggaaaaatcaaagtatttgatacaaggataccgacaacagtcaaggtgggagagagcatttactacaatatgccgattgctcagtatagcaaaaaagcatctgcaggaatcgcatatagaaaatttgcaaaggagataattgcatatgaaggctaattcaaagagaaaagtatttggtgatgcagtagatttgctgatgggagatatggaagaagtaacaatgccaagaggtgttcagatgttaccagtgaagggtattcagccttttcacgatcatccgtttcatctgtatgagggagaacgcttagaagatatgattgccagtgtgaaggagcacggagtgctcaatccggttattgtacagaagcttgatagcggttatgaaatgctttccgggcataaccgttggaatgcagctaagctggcagggcttaaagaaataccagcaatagtgaagaccgatttatctgaggaagaggcctatgtgtatgtaatcgaaacgaatctgatgcaaaggtcattttcggatttggcaatatcggagaaggcagcggtgttgaaggcaaggtatgagaaggaagcttgtcaaggaaaaagaaatgatattctggaagaaattgctcgtctagaaggcaaagaaatttcgatcactcgtggtcacgatgaccacaggctgaaaaccagagatatgattggcaaggaatatgagttgtccggtagctctgtggggagattacttaagctgaatgacctgattaaacccttcaaggatatggtggatagaggtgccctctatacgaaggtggcattacagctggctttccttccggagaatgagcagacgatggtatatgagattatgagggagaagaaaactaaaattaccatagagatggttatgaagattagaagtcattctggtgctctgacagaggcaatggtaaaaagatatttaagtacagaacctatcaaaaagaaatgctataaggttccaagcagaattgtggagaaatattttaagggaatggacccgaaccaggtggatgcaatagtggaacaggcattggaagcctggtttagtaaggaggctgcgaatgttcgaacagaagagccttgataggattgatggagattacttcaatatcataattgcggatagtcaggatgtgacgatacagagcaggaataccggtcattactggtacctgcactgtgccggatatcctacagaggaagctttggtcatattccataagcatcgttttaaggacgggtatcatcagcacggacacgcaagaagtctgagacaggcgattaagagtattgtgagacacgatgattaccaattgaatgtaagaaaatgcgtataacataaaagacagcggtatcttcgaagtgaggataccgctgttttcaaattaaggaagcttattcaccgaaatagagtttctttgccagagcctgtgctgctttgatgtcagtatatccctgagattttccaagacctaattcatcaagaatctgtcctttggtgtaatcctcgcagataaggtcgagaatacgaccatacttcggattgatttcatgaatcttttttaagagatcctgaataatcatacggagcataacggtttcttcaagattttccggtgatgcaggttcaaagcctttgccatcttctgatgtggcttcgtccataaactggttaagagagagaacatcatctgatttaaaagatgcaaagtgtgctctgacatcagtattgaactgtttaagggcagcaggcttgtcctcaatttttacaggtgcaaatgctaccagaaccttattaggtccgatatgccaggtctcaaggttgtcctggcacatattgaagtgtttcaccatttcccagtccacacggattggtacgaggcattctcccagatgaagtgggagattgttgtaactgcgacggttgtcgtagttgtggttgtcattggttgactgctgattttcagtacttgtctgtacatttacattgatttccatatcgtgcggcctcctgtgtccgctgaatgcggaacgaaggcttcgatatgaaattcagataagcatcgattgtcttattcatggcacgtctccgttccgtaaaataagcaatcaggcttcttagcccctgatgcggttaattgggttcatcacgccacaactctaagaagatgctggccaagcagttgttttgtgatgttcttacagagaaaagaaaatgttcatgtacgtaaagaaaatatcgatttttctcctaatgtgtgatataatgaaatatcatggtgaaattctcttcttttctcatttggaacacttttattgtagaaaaaaataagggaaaaatcgtttgggacgagttggttgaaagttgaggatgagttgcaaatttgggaggtgaaagcattgtcagaattggtttttgcaacctatttaaaagaactgaaaaatgcatgggcagaagaaatagcagatccggatttgattaatctactatatgatgctgtttctgaacctatggagttggtgaacaaagaaaatggcactatcacgaccgaaaaatctgcagctagtaagattgtgaatcgtcaaaaaggtggaaatgcgctaaaagttatacgaactaatgccaataaggataaagtgcgctcctccattgaacaatatttcgagaaaaatgtggtaaagagattacacagtgactgtatagatgatttgatttctaatctgaagaagataatcgagggagattcgtcgatatcggaaacaaaaaaggaagaattattaaagaatgcttctaggaataaacttgcagcgtttttgggatttacttatctgtattcgttgacaagagataatgttttgaaagaaataagaataaaaacaacacaggaaattgaagattataaaagacatccattaagagaaatacctactccgccagaagtaatagaagaagaacggaaatatgcagatgccttgatgactgtatatggtcaggcagagggcattccgaattttgatgagtcaatgcttgcaggatttccgaagcatcagcagcatttttcagaccaacgaggttactattttgcggcagaagctgtaagacgaggaacgcgcgacatatacagtgatgaaagtcagttcgatgtattgaagaatgagacttatgaaggtgtaaaggaagtttgggaagaagaatacaaaagtggatatgcacgattgcgcaaagtgatgtcgcaggcatctgctacgagagttgataagtgttggttaagcagagatactgattgggtaggaaatccacagaagaaaggtgtgtgccatttccttgttaaagaagggaaattggacggatgggtacgagacgatgatgaacagactatttaatactgtgtttgaaaactcgctaagaatgcttcttcttttgaatttatacgagatgcctcaaacattggatatgttatatgcagttgattttatgacacagtacggaaaaacctttggtattacaaatgaagagttgaatggaagcaatccattcaaattcagtgagtttaccggtcgaagagatttggtgaaggagagtctacggcagttagtgttaaaaggattagtacaaccagtcgaaacaagtaagggaatgtcgtacgtgatttcatctgagggagaagagtattgtgctatgttggatagcgagtttgcaatgaaatataaagaatatgcaagcaaaacaattgcgatgattggaaataaatctgaaaggcaaattataagtcagataaataagttgtcgacatcactgtgaaaggagattggctgatgagcagattttttataaagcaaatatccgttactggagaaaaggttttattttctgaagtgtcattcaatgatggagtgaatattatttacggaccttcaaatgcaggtaaatcatatataatcaattgcataaattttatgtttgctggagacccacctttcactaagtcatcgactgggtatgatacggttacgatgacaatggagtcggatgatggatatgcaatatttatgaccagaaagattatcgatggaaaaaacggtgaagtgggtgaaaactccgtagaagtgatcagtaattatccaaatgtagagagcgggccatatagcattagtaaaaatgagtacagtgatcttttattgaaattgatgggaattaatgaacatcacaagattatttcaacagaaggatttgattctcaaagcttaggaatacgtactttgatacatttcttttttatagatgaagaacatatttttggaaaaagaactgttctagattcaccaagctacagcaagattaatgcatacctgtgtgcattgaatttcttgttgaccggtgatgattctatgcatttgatgccggaagaaactaaggaagaacgtgagcggagaatcactgagcgtacaggagttattgcctatttgaatcagaaaatagaagaattatctcaaagaaaagcggagctcgaggctagggaagcagttggggaaactgatgcagaaggaagaatagaagagttactttcagcgattgaagagatagaaaatgaaataggaacagcttcatcagaaaatagagaattaatgagagagagatacgaaattagtacgaaaattgaggaagcattgttccttaaagataggtatcgtgtattaaaatctcaatatgaagcggacatattgcgcttacaatttatatgtgatggagaaagaaaagaagatactattgatgaggcagttgcgtgtccattttgtaatcatgaaatagaaaaaggaactgtagcgcatgaatcatacatagagtctgcaacaatagagattcaaaggattcagctacaaatcagtgatttgatttctgctgaatcagatgtttgcgaaggcattgataagtacgaaagaaaattgcaagagatagatgatcagattgctgaaattacaaattcgattaatggagaattaaaaccaagggctgcagaactcaggcagtctgttgaagcttataaagaaattttaagagctaagcaagagatatatgcaattgatgctatggcaacagagcttaatacagatgtatttgaaaaagaaaatgaagaagatggtgaaagtgcaaagtttaaaggaagagaacttatcaataaagatacctggaaggttttgagtgataacctaaattcaatgataaaagagtgtggatatccaaattcaccggaatccagattgaatatagatacattagatgtggtagttggtggaaaatttaagaaggatcaaggaaagggatatagagcctatctgaatacaattatgttatttaaccttatgaagtatttggaagaaaacgcaatttatgcaccacatcttttgattttagattcaccaatactgtccttaaaggagaaaaaacacaaaattacagagaaagaaaaagccacgcctggaatgcgggaatccctgttcaaatatattgtaaatcattacggaaagaatcaggtgattattgcggaaaatgagattccggaaggcgtagattactcatttgttaatttaattgaatatacaacagacgaaagagaaggcacttatgggttccttaaaagcgtaaaaaattaatagttgttgaagaactaagaggagaacttatatggcgaaggtaatcagttataataaactttggaaattgttaattgatcgaggactaaagcgcacggacttaaaggatatgtgcaaaattagttcagcttcgattgcaaagcttggaaaaaatgaaaacctgacgacgggagtcctgcaaaagatatgcacgggactagaatgcgatgtgtcggatattatggagatgattgatgtcccggatgaattaatcgaagatggacaataactaagctgaaatagaatgacaattctaatagacaatacttgaggagggggactaatggcttttgattttggaaacgcgaatgatcaacagaaagaagctattcagacaacagaaggcccattgctaataatagctggtccaggaaccggaaaaacatttactcttgttaagcgtatagtctatctaataactgaaagaggaatacaacctgaagaaataatggttgctacttttacagaaaaggctgcaaaggagcttattactcgtattactaatgaattgtataagatgggggttcaagtgaaccttaatgagatgtatgtaggaacatttcattctatatgccttcgagtaataaaggagcatttggaatacacgagagttaagaaaaattatcgaatgctggatcagtttgatcagaagtacatgatttttcaacatataaacgattttagggcattacctcactatgaggatatatttacaaaaaaaattggaacatggaagcaagctggagaaattgcaaaatatgtaagtaatctattagaagagttggtggatgttaatggaatgttgagagattctaatccagcaactgttggtatggctaatgttttggcattatatcagaagataactgaagaagaaaacttgattgatttttcatctattcaaacagaagcatattctcttatgcttaaccatccggggattttggcagaaataagagaaaaaattaaatatgtaatggttgatgaataccaagacacaaattatattcaggaattaatcgttttccttattgcaggagagtcagagaatatatgtgttgttggagatgatgatcaagggttataccgattccgtggagcgaccataagaaacattcttgaattcccggatcattttattgatgggaagtgtaagcgagttgatttgaccattaattatcgatcagaaaaagaaattatagatttttataatgattggatgacatctactgatgaaaagtttgtgtggaaaaattttagatttcccaagaagattgtgcctggcaagaaagactattcttcagatacaagagtagtaaaatgttctgggaagaacggtgtagaggattggtatgatagtgtatacgactttgttatatcgttgaagcatcaaggtgtaataaaagattacaatcaggtggcttttctgtgcaaatcggttaagaatgacaaggtaattaatcttattcagtatttggaagctatgaatatacctgtatattcgccgagatcagagatgttttttactaggcctgaagttaaagaaatattgggatgtttgataatgtgtttccctaattatttcttaagacttaaaacagaaagttttacatattcttatccagttctttataggtactatcgtgaggaatgtgtcgaagcagcgcagaaacttattaaggcacataaagatctgaaaaaatggtatgaaaatatattgcgtaatcatagtcaattgaaaagtaatacagattatgcatttactggtattatctatcaattgctggaatttgaaccttttaggggatatgttggaattgatattggcagtggtgttacagatgagagagccgcaagaaatatatctattctttcagctgttttgggcaaatacgaatatttgcacagaatagaagtattttcggagaaaaatataataagtgctccggaaatcttctttaatatgtatatgcgctttttatttgaaggtggaatcacggaatacgaggatgattctgagtatgcaccaagtggatgtgtctcttttatgacaattcaccaatctaaaggaatggaatttccggttgttatggttgattcattgtctgctgttccgagaacacaatcagatggagttattgaagagatagaaaagaaatattttcacagacctgcttttgaagcgaaagaagatattaaattctttgacttttggagattgtattacactgcgttctctagagctcaaaacttactagttctttcttgctatgaaaagaatggcatcggaagaactccaagtaagtattttgaatcttgttatagcacattaccatcatataatgatgtagatttatcagaaatggaattggaaatggttaagcctgtaaatattaagaagtcgttttcatttacatctcatatcgaattatatgagaattgttcactacagtataaatttttcaaagagttgggttttacacaaattagagtaggtgctactttgtttggaactctggttcatgaaacaatagaggatgtacatcgatcagcaatgcgtcacgaagagagtactattacgccggacaatgtgcgtgcatggctcgatacaaattatttgactttatctaagagtgaacattcttatttgggtgtcaagcaggttgatgctgcttatagacaggtgattgcatatgtagaacggatgtctaatggtacaggcttgacaggagatggagtagtgacaggagaatctctttggagtcatatccaagatgcagaagttgatgtgagccttgtaaagccagaatacatacttaagggtaccgttgatttgattcgtggagatggaaatacagtggaaattgttgactttaagtcggagaaaagaccagacttaactgaacggtcagaggattttgaacgctataagcgtcaattggaagtatatgcacatcttgtagaggaaaaaacaggaaagaatgtgagtaggatgcatctttattacactggtgaggaaggggcaaatcctactgttacatttgagaaatctcagtactcaattgataagacgatttctgaatttgataaggttgtagctaagattcaaaaccatgaattttctacagaggcaaagaacaagaagtcatgtctcaactgcgatatgaggtattattgcaagaaagttaagaaacaatagggaggacatatggaaataaaaagatttagcgattttataatatgtcctattccagctgtatctgaactagatcaggctgagatagaacaaatcgtaactcatacgcataatacatggcaacacgatcgtccaattcaagaaataagggaaaatacaattcagggaaaaagggcggaaatagtaatagaaaatattctaagggataatagtacttccagatttttggcatatgacaagatgagaagagataattttaataagcatgcaccatttgatggaattatttatcgcaatgatattaccaccaatatattgcagtcagcaattgataggataaacaatgatgtgattagtattgcgggagactctggaacaattactgttgagacaagagaatatttggaaacaagtggcatttataccattgaaattaaatcttctttacttcaacatccaagagattatcgctgtattaatggtgatattgaagttactagatctgatgataattatctaagattatgtgaatatgtaaaaggtttttatgattattttgtgtatccacatttttgtagggataataggaatataacttcattttatgattacacaaggtacattagagacattaataattggggctcaaggaataagcaagaatttgtatattctttaatgaaacaggaatttgataatgcatgcaatatttatacaagagttttttttgatttgagaagaaatgaaattttgattccgggatatatcgtaaaaacaagatttttcgaagaaccgcgtattagaaaaatgccatctccaaaatctcagaatgcaatttattatatgtatcacatgcaacatggtaagaatattttagaaattgataatgatgaggatttgctaagatggaacagaattgctgcttatcaaaaattattcggtgcaaatattccgtattgtccttattgtgggaataggttgagaatggtagaggttacaggacaaaatagtaaattcctttatgtatgtgattcttgccccagagagcacaaatggatggaaatgacagatatttacagaaccaatatgtaggaaggattagtacatggaaaatttatcaaaaaagagaagggatgaaatgatagccttcttagagctgcttaagaaacaacattcggatgatgattcgttaatagcgattaataggattgaaaaggaattgacctcaaagaaatatggtttggtgtgggaggaacatcaggaagaagttgataagaaaatggaaacgcatattcctgtattttcagagattccggaatatgaattgattgaagatgaatataatacatcttttaactttcttttagaaggcgacaatttacattctttaaaattattagaaaaaactcacaaggggaaagtggatgttatttatatagatcctccatacaatacaggaaataaagattttatatataatgatgaatttgtggggcgagaagattcgtttagacattcgacatggctttcttttctttcagaaaggttgcgaattgcccataaattgctttctccagatggattgatttttgtgtctattgatgataatgaacaagcacaattaaaactcttgatggatgagattttttcagaagataacttcattatatgtatgccaagaattaccaaaaaaagtggaaagacaacgtctgcatatgcgaagaatcatgactatattttggtttatacaaaaagagaacaagacatctttgttatggaagagcatgtagatgaggcgtttaaatatgaagatgagtatgttagggaacggggaaaatacaaactaaatcaaactttagattatgatagtttgtcatatagttcttcgcttgactatccactggaaatcgagggagaaatattctatccaggcagcagtaaagaattgtgggaagaaagacagaagggaaaccatagacgtgctgattgggcatggagatggagcaaaaaactctttcaatttggatatgataatggatttgttgttataaagaggaaaaaggatggctctgcaagaatatacacaaaaacatatctgaacgcaaaaattggaaaagatagcaatggcaattttgtcattgaatataacaaaagagttaaggcgaccagctcattagaatatattgataataaatactcgaatgacaatgcaaagaaagatctttccctatttggattaggcgataaatttgattattctaaaccggtagagcttattaaaaagctggtaaaagcatattataaaaatgatgcattgatattagattttttcgccggatcgggaacaactgcacaagcggtgctagaactaaatgaagaagatgggggctctcgcagatttattgtctgcacaaataatgaaaataatatttgccaggaagttacttatcagagaataaagactgttttgactggaagaatggcatctggttgcgaatacaaaaaaagagtaaaaggtaatttgaagtactatagaacagattttgtagacaaaaattctgatgaattggtagatgaattgcttgaacatatagtagagatgattcagttggaatacggagtaagtattaataattctcagtatctaattgtcatggatgatgacgaaatggatgatttagagacgaattataattcttataagaatttgaaagcagtgttcttaaatcaagatgtattgctgtctacttcacaggaacgaatgctccagaatgttgatacatttataattccggactattactttgatttcgaactaagggaggctggagaattatggtaaatggaataatggattttgaattccaggataattgcgttgagttcctgattgacaagacattggatcctgcaagtaagcaggttatcacagtcaaagcacctacgggggctggtaaaactgtcatgctcattaaatatgtagatgagtatcttaagaatacaagtggaaataccgcttttgtatggctatgcccaggtaaaggtgatcttgaacaacagagtatggataagatgaatgagcttactccacagagagatactaggaatctcttgtattctatgcttatgggctttgaaggaggtagtgttacttttatcaactgggaacttgttactaagaagggaaacactgcacttaaagatggtgaaaaagcaaacttgtttgaaacgattgccgctgcccatagggatggaattcaatttgttgttattatcgatgaagaacatctcaataatacgaagaaggcggatgatattattagagcatttgctgcaaagaatattattcgtgtgtctgcaacagcgcagaaggtagcacatcatgaatactatgaaattccggaagatgaggttatcaatgcaggacttattacacgggcaatctatgtaaatgaaggcgttgatgagaaaaaacagatcacaaatgattatgagtaccttcttgagttggctgacgaaaagagaaaagaaattcaggctggatatgatgcaatcaaaacaaagattaggccacttgtgcttattcagtttccgatgggacaaccagaaacgattgcaggtgtagaagccaagcttgaaagtatgggatatacctacgataatggcatggtttcaatttggatgagtgatataaagagaaatattgatgatcttacaggaaatgatggttcaccagcatttcttttaatgaaacaggccatttctaccggatgggattgcccgagagcaaagattcttgtaaagcttcgcgagggcggtagtgaagattttcagattcagacaattggtcgaattagacgtatgcctgaaaaaaagcactatggattgaacacgcttgattattgttatatctatacattagatagccattacaagatggggcttatgtcatcaatggataaggcttaccaggttaggagattatttgtgcgtgatgaggcaaaagattttgttctaaccaaggaacttcgaaatcttgactttgacggacttggagagagagaaacgttagaaaaagtatatgagtattttaaaaagaagtatagtcttggaagtgatatgcgtataaatcgggagaatcttgaggcttgcggatacaattttgatcatgaaatagatagtaagatactacaaggtatattccgaacaactgaagaattagcttcaggagtaggaaagaacaatgtaacaatcaaaactgcagtaaatactcattctcatggtatttatttgttgcattccgttgatgagattaagaaggttacaggcttgcaatcgcagaaggtgaagaatattcttcgtagaatgttcagcaaagggaagaaaacaaagtacaaattcgttgcattggaaaattcagatttctatgcatttatcattaataatgttaagcagttgaagattgactttaaaggatgtactgctcagatgggcggaagacagatgtcattcgttcttgagccaaagcaggcggagttttctattccagagatggaaatatataagtatagcgaagtgaagaaacgacagcttatgcgtttgaatgcctatctggaatataccaatgaatttattactgacaagactcgaagtatgccagagagattatttgaaagatattgtgaaacaagaccggatagaattgagtgggtatataaaaacggtgatacagggcagcaatatttatcaatagtatatctggacggtttcttaaagcagtggctgttttatccggattatatagttaaaacgaatgatggtcaggtttggttgatagagacaaaaggtggagaagtagctgggcatagtaagaatattgatattcaagtagaaaataaattcattgctttcaaacagtatgccgaaaagtacaagcttaattttggttttgtgagagacattaatgaggatttatttatcaataatacagaatatcacgaggatatgtctcatgatagttggaggccacttagtgatttactttgattttcaataaggggtggaaataataaattgggggtatgattgttgcagacattatatatattcggcaatggttttgatatagcacatggaataagaacgccatatgcagcttttagagaatttttgaaagagaatcatgagtcttttttaactactttcgaaagtatgtataatattcaacccttagatgatacggaaccctggtatacgaaagaggctcaagaaagatgggataagtcggttattaatgatttgtggtggagttttgaagaaaaaatagggcatccggatgttgagggaatgtatgattctgcttattctatggtagatacaatgcctatggagggcataattgatactatgaatgtatactggagggaacaatacggatttgtagataaactccaaaagtacgtattagaatggttacaaactattgatacatcccaagctatgtgtaaaaaagatagtctcattaataacagaaatgatctgtttatgagttttaattacacagatactcttgaaaaggtttatggcataaaagacgtacttcatctgcatggaggtatcccatcatgttgtgaaatagcccctataatgggacatggaaataagtacataattgatttatatcgcaggaaagcaaaagaggcgcaggaggaatatgttgaatggtatgaaagcatatgtaatgcaattgctgatttttgtgagtcgttgtataaggatacggatgcgataataagtgagaatgatgatttcttttcagctttgagggatgttaatcaagttgtatgtctgggattgtcttttggagatgttgatgttccataccttgatagaattgaatatgaagttcgtccagaaacaaaatggttggtttactatcatagtgatgaggatcttaagcgcctgaaaagcgtttttggaattacgggtatttcaagaaagtttgaagtatactttcgtaaaagtgataacttctgggacaggtgaaagtaggtgacttctttggaattaatagatgagattgaagaactaattatgatgcatcaggaaggtccttattgggatttcaagcgggagtggtatgatgatagtaaggatggagatctgcttattgatataatttgtatggctaataatctggtggatagagatgcgtatattattattggtgtcaacgaagaatgtgattatgctatacaggatgtgtcacaggatgcaaatcgtagaaatactcagatgcttacggattttatcagaggtaagaaatttgcaggtgattttcgcccggttgttactgtggagcaagtacacttggatggtggactggtagatgttattgtggttcataatagtataaatacaccatattacttaaaagaaaagtataagggaatatttgctaataatatttatgtaaggcttcaagatagtaatacacccgttgataaatctgcagattttcatcatgctgagtatctttggaagaaaaggtttggaatgctgctttcaccaattgaaaaagtgaagttgtatttgaagcatcctgaacattgggcaaatagtccatcaagcgaagataagaaatactataagtatgctccggaatttacgattgatcatacttatgagccggaggatgacaggactggttatgagtactatttgtttgcacagaccgattcaagaccgcattggagtgaaataagaatatgttatcaccagactgttctggcagagcttggtggtgtgattcttgatggcgggaggtattttacagcaacaccggatagagatggaatatcgcttacagaatatcataactgggatgtgccgtatcgttatatggtaaaaggaaggctaaatcatttggtgcatgaattttattatgtagatgatggtgatgaagcgcggcattcacataatgagtatgaagggtgtattttaatatttgaggatgaaaaagagcatcagcgattcaggatatatgttagagaaaattggtatagaaaagatgcatttgcaaatgatatatggattcctcatatggaacaactaccaggttataatatggatgcatttcgcgaagagtatctgaacatgcagattcttagaaagatgcttgaagagtttagaaaaaatgataatacaaagaattgatgtattaagcggcctctggcaaataccggagaccgctatctttaatcttttttataaaatttggtttcatatccatcgcctctaatctggatgtcaggcatccagtctggggatctgctcatgataccgcagatggatttgtaatcgacattctgactacattcgatgataagctcatcatggacatgaccacaaataaagcagtgggagaggttacgcatagcaaaacagagaagatctctggagactgcctgcacaatgttctcaacgaatttcggaccgtagctttcgattcgttcccatttcttagtggagccgataccttcataggttacggattcaccgccgaatcgattttctccgatacgaggcttgacgtagctaagagttctaccagaaggaagtttgatgaagagtatcccacttcgacagaggaatttgattccgtttacctctgtaggaatattcatttttatagtagtctttacggcattatccacattccaccagaaagctgtaatatttggattggaagcacgccaggagtcaaccagtggctgcagttcatcttccattaatcccatatccaaggctcccatggaaataagggcaccgatagaaccaccatatcctaaggcgagttcagcgattttacccttttgtctaaggtgtgagtttacgccatgcttttctacaggtacgccaaacatctggcttgcagaagcacagtagatatctttaccttctgcaaatactttggaacgccaggactcaccggcaaggtgtgccaggactctggcctcgatggcagagtagtcagatactacaaatttgtatcccggtcttgcaatgaaggcggtacgaatcagctggcttagtgtatcaggaatatcatcataaagtaattcgagagtttcataatcaccgatacggacaagctcacgagcttcagccaggtcattcatgtgattttgcggaaggttctgtaactggattaagcgtccggcccatcttcctgagcggttggctccgtagaactgaaacataccgtgagccctgccatccttgcagacggcattctgcattgcctgatatttctttacagaggacttagcaagctgaagcctgagtttaagtgcagcagccacatcaccgtcggtatcttttatcatagctgccacatcttttttaccaagggattcagcctcaatgccgttatcagagagccactgcttcatctgaactactgagtttggattatcaaggttagtaatattctgcatagcaatcataagctctgctttggacttttcatcaaatgcaatagcattttctaccacatccatatccagcatgattccgcggtcattgatttcctggtcgagatagtattcttcccatacgaagtcaggaaccgggaatttagataatctctgtttaatcgccatttctacgtcaacatcacgtttgttataggttttgaaggtttcccatttatcaggggcatgctctggaaggtttctggttctgccgccatttaccttagtcggcttgcaagggcagcagaagtatttgatgagatctttgccttccttcattttctgatcttgtagtttaaggactgcaccgacaccttcaagggagagcggtaagcccatataggctgaccatatcatggtacacttccatgaggctggatccagatatttggaagcaggatcttccggaatactgtagcctttgaaatgcgcagggtgatgttttctaagccagttggataaacagattctttcaaaattggcattgaaagcccactttgtaactgtatcatcagataatgctgcaaggatatcatcgggaatggtatcgccacaggcaaggtcaaatacctgtacttcaccaccatcaatagatacgccaaatagtagtatttcaaaattatcagactcagcgtatttataggcgccacatttggagatatcaacatcgctgtaggtctctaaatcaattgacatttcttttatcataatctcattcctttacaaaaagggcagcagcaccggggagtactgccgccttgatattagtttccttttgggttctgttcttttagctggaaccattttgcctttgggaaaagccagtgaaggaaacgttttgcaacacccaggaaccacttccagattgcagcaagtcccattaaccagaaaccggctaagaagcctaaaagggatccgcggataatagcatctaatatttcattaatagaatccatagtcataatattttacctactttctaagattgtcacaggcggcagcagtattaccaccgcctgcttggttgtcattgttacatttgaattaatcaaggaaatcgtcatcttcatcggaagcgaaatcatcttcagctctggacttgccaccaagaggctcaccgtctctaatcttctggagattattaagcccgcaggcgatacctttgttaccattgctgttgaaagcatagagattgatggaagctctgccgtaaacaccggaatatacttctgatctctcaaggataggctgacggtctgtgtccacgatgccaggtgcagaagcactgttggcgttgatgaaatatgcatttgcataagcaggatcatcaggtcgctctaaatcaccatcacgaagaggtgtcttgagaacagatagggcaggaacagtcttgccattacccttaagtttgctctgaccttcctcataggctgcttcgatagctgccttgatcttgttaacggttacggtgtcggacttaggaatgatgagagagacactgtacttcggtgcgcctccgttgatgctctttgcatcccatacattcgcgtagctccaacgtgtatttactcctgtgataacctttgtaggattctgaatttttgccatgatattggccctcctttatttgccttgtggtataagtccacggaatcatttcgtgctttgcactttcatgattcctacgtaaattcgcaatccgccttatcaggctacttgctcatttccgttgtcgtctctaatgcttaaacagatatgtctgcgagcagccaatctgttttaagcattgagactggacttatatgctaaaatcatctattgctgtattcattgccggtctcttatcggattccggtaccaatgctggtttacctggtggcttatatacaagctcacctaatagctcttcaaatttcttctttccgagcaatgtgctcatggcagtgatgccaagaagcttcttctcatacgggtcgtagcccgcatcttttactttgaatgccacagcggcttcatcagtaaattttctattggatctgccttctacgattttccaaccgtcaaagtgaacaccagactgggcctgctgtaaggcatattctttgatgtcatttccccaggagatcatttcatccacctttgctaggatagaggcgatttctatgtcatctagggtagttggcatttcaaagtcatattttgcaagctcaagattgtattcggcgcgctttctgcaggtggcttttaccttacagaactgacagtggtccccggatttgaattcgccttcgcctacatatgcaagctgtgcggtaggtgccagaacttcgtcagcccatttcagaagcacatctttggaaatggtgtaagtactgacgttgtcacgtcttggctggaagatggtcatctgaatctgattgatgtcgtagatatcaccgaaggcttctaatgcgcctaaggcgtagcacatcatctgactgtttccaccatgttcctcatcgccggcgcttaccagaacgccgagaccgtgcttgtaatcgataatctgcaatacttcatctgcaacgatgacacagtcaccggttccaaagccattttcaacccagcgggagaagtccagtctctgctcaatcatgacctgcggatctttgcagaattctttggctgtttcaatctgctccaatacataatttctgtattcctctgcgcagttccgcatctctgcatcatagaaggtaagattttctgtcggatctgtgacagctctaccaagtgctttttctacaaggtaggcacagagctcatgacaatcggttccctgctgggcatattcagatgtttgatctgcaatattggcacagagctttgcgcttggcggacaggctaaccatctgtgactggcagaagcggaaaggtatgcatgtttaggcatttccaatcacctctgcttccttaagaatggctgcatagtcatcaggatttacctgctttaactgctgagcgccatatttctcaagaagctttttgacttccttcttatatccagcggctgatttggaagcgagtactgcacgaacatcttccttggtataggtaggttctggtgtttcctctgctttagccggttcagaagcctttgtagctttcttggttgacttgggttctgttttttcgggtgcttcttcggtagaagagaagatgtctttgattgcgttagcagctttgatcattccttcgccgcaggaaatcatttcatcaagcacctgagataattcactcattttgctcatcttgttttcctccattttctgtattctgttgtcttagattggctgccagtcgtttggctacaacactgattgcgatgagagtatcaataagctcttcatcaatggacggtgtagcttgctggtttttatcaatcgtttctgtctgcatctgcagcacctcactttccgaatggctttcgtgcctttctatcttcctaagcgcatctggaaattgtttttccggtcgagagcatatttttttgaaaaaattttgaaaacagtcagggcattttttgcctttataaggaagagataccgctctggctgttattttttggcaaattttgtcctacgaccggaaaagtgtaggtcaaacccgcttaggaaattaggaggattttgttccttactttatagaaaagaggtttgagatatgcaggtaacgatttttacagcaaactgcattggtcaggccgctaactgtagctatcccaataaggtgacagtagtcacgccggagcagcttcgggaggcggtgaaggcagatcatgtttgcgcagagtacaaaggaaactatcgaggtattggtaatttcattcgttcagatgtgattgtcatggatattgataatgaccattcagaggaaccggcagagtggattacagttgagaagctggaggaaatattcccggatatggaatatatgcttgctttcagcagacatcatctgcttccaaaggaggggaagtcggccagaccgagatatcacatctattttcctatttcagagattacagatgcagaagtgtacggaaatctaaagaaggcattacagaaggagtatcccttctttgatggaaatgctttagacgcagcaagatttatcttcggtgctgattgtgaagaagtattggtacatgatggctggatgactattgatgaagaaattgatgtcagtcaggtagttgaggaagaagattttgattccgaggattcggagagcgcatctggtgggcagattctgaaaggtagcagaaataatactatgagccgttttgccgggcgtgtgctgaaacgctatggaattacggaaaaagcacacgaggcattcttagaacatgcaaagaaatgtgatccgccgctaccggagtcagagcttaagactatctggaatagtgcggcgaagttctttaagaaaagtattgtgaatcaggaagggtatgtgccgcctgatgaatataatgcagattttgaaagtgcttcattgaagcctgaagattattcggatatcggacaggcaaaggtattagttcgagagtatggaaatgaactcaaatatacgagtgctacagactttttaagattcgatggtgagtgttggcgagaggataagcagatggcgattggtgctgttgaggaattcttggatctgcagcttcaggatgctatggatgaagtggcaagagttgagaaggcgttggaggatgcaggtgtaccgaaggaatctatccaggctggcccgaaggagcttttaaaagaggtagatggaaagcttattcctttggtttatatgctgatgggtgctcagacttatctgaagtttgttcagaagagacgtgattacaaatacatcgtttctgccgcaaatactgcaaagcctatgattgctatttcagtatctgatttggataagaacgagaatctgattaacacaccttatgcaacctatgaccttcgaaaagggcttgcaggggaactgccgcataatcctgaagatctgattacaaagattactgcgtgttctccgggagaggatgggaaacagatatggctggatgctttgaatcttttcttctgcaaggatcagaaactgattgattatgtgcaggagacggttggcatggctgcaatcggtaaggtttatcaagagcacatgattattgcttatggtggcggtgccaatggtaagagtaccttctggaataccattttcagagtacttggaaattatgcaggaaagctttcagcggaagccttgaccatgaattgcaagcggaatgtgaagccggagatggcagagcttaaggggaaacgtctcatcatttcttcggaaatggaggaaggtatgagattgaataccgctgtggtgaagcagctttgctctacggatgagattcaggcagagaagaagtataaggatccgttttcctttgtaccgtcacatacattggttctctatacaaaccatcttccaaaggtaggagccaatgatgatggtatctggagaaggctggtggtcattcccttcaatgcaaagattacaggtaaaagtgacatcaagaattatgcggattatctgtttgagcatgcgggtcctgcaattatgagctggattattgaaggggcgaagagagcgattgataagaatttccatacaacacttccagatgtcgtagaggccgctatccaggcatatcgcgaggacaatgactggctggggcagtttctggaggaatgctgtgagattgatccatcttataaggaaaaatcgggtgaactgtatcaggcttacagagcgcattgcatgcagaacggcgaatatatccgtagtaccacggatttctattcttcgatggacaaggctggctataaccgtattcgcaagaataccggagtgcaggtcgtgggattgaagcttaaggaaggacaggattttttggagtaagaaaaagcccttttgtgtaggtcgttaacctcagtacataaaagtccctttaggaagaatttgaataaatatctgcttaagagagttttacggaacgaggtactcgacctgcacacctgttaagaatgatggaggcgtgcgatgcgtgaaaaatatattgaacagaaattagtgagagaagttaaaaagcgtggtggcttgtgtgagaagtggaattccggttcatcgggctggcccgaccgacttgttttattacctgatgggaaatttgggttggtggaagtgaaggcgtcaggaaagaaaccaagagttttacaggagcacaggcatgaccagctaaggtctcttggatataaagtattcgtcctggatgatgcaggacagattggagggattcttgatggaatacaaaccgcatgattatcagcagtttgcaatcaattatatattagaacacccgatagcagccgtgatacttgggatgggacttggtaagaccagtattatgttgacagctattgaacagcttatttatgacagctttgaagtaagtaaggttttggtggtggcgccacttcgagttgcaagaaatacctggagtgatgagattcataagtggaatcatctgaaacacctgagatattccattgttcttggttcagcagcagagcggaaaaaggctttggaggcgtatgcagatatttacattattaaccgtgaaaatctgcagtggttgattgaacaaagtggagtgaattttttctgggatatggtagttctggatgagctatccagctttaagaattggaactgtaaacgctttaaggcatttatgaaggttcggccaaatgtgaaaagggtaatcgggctcactggtacaccttccagcaatggactgatggatttgtttgcagaattcaaatgtctggatatgggagaaagacttggaagatttatcagccagtatcgtgtgaattattttgtgccagacaggatgaatggtccgattgtttattcttataagctaagaaatggagctgaggaacagatttatgagaagatttccgatatcacgatttccatgaaagccttggatcatcttcagatgccagagcttatcagtaatgaatatccggtttatatgaatgatgaggaagcgaagctttatgcggatatggaagaggatttatttattcctttgaaaaagggagagattacagcagcaaatgcagcggctctttccgggaagcttcttcagatggcaaatggtgctgtgtattccgatgatggcgatgagattgtaatccacgatcagaagctggatgcccttgaggatatgattgaagcggcaaatggcagacctgttatggtggcttactggttcaaacatgatttatcaaggattatgcgaagacttactgagaaaaagattccttttgaaaaattggattctgaggaaagcatcagaaaatggaatcgtggggagctgcaggtggcgttaatacatccagcttctgccgggcatggcttgaatctgcaatcaggtggaaatatgctgatttggtttggacttacctggagtctggaactatatcaacagacggtggcaagactttggagacaaggacagacttcggagacggtggtggttcagcatattattactgctggaacaatagatgaggatgttatgaaggctttagcaagtaaggatatgacacaaaatagattgattgctgcagtaaaagcgatggtaacacatggcaggtaagaaccaatttgaagacccatatgaaagacttgcgaatgcgattatccttagtgcggttgctgattacagagccgcactcaaaaaggtaaagcgcaatccaaaaagcaaggcggcaatagatgaagcgttacagattgagaagtttttcagaagttcgtggtatcaacagctgacttcggttgctggagaattcttaatccgtaagcttcaggacgaaataagacaatcagagtaaatccgagggaaataacttttcggaggtggcttatgacggctaaagagtatttgaaacaggcatatctgttggataagcagatacaggttgaagtgaaggagctagaacagcttcgtgaaatgagaggtacgattcagggatgttcttatggagaaaagattggtaccaatccgaatagaaatctggaagcaccatttattaagaccattgaaaagatatgggattatgagcagagaattgatgcacagataaacagattgatagaccttcgttcagaaattaatgcggcgattgaaagtatggagaacccagaggaaagacttcttcttaaataccgctatctgaaaaatgaaagctgggaagatatttcctatgacctgaatgtatcttatcgtaccgtacaccgtattcatgcatcggcattaaataattttgtggtgcctgagtaagttggcatactttgtcccaacatggcataagcatatatgttattatgatagtgtcgaaagtgtacgacagagaagagccttggaagccaaaaacttccggggcttttgttatgaaagaggtggatgcattgccatatagaagtaacataccgtgtaaacatcctggctgtgcggcactcattccgcacggtcagatgtattgtgaggaacataagcctttacatacaaaggacagagctcatgcagcagagcgtggctatggtgccaagtggcagcgtgagagaaggaagttcttagagagcaatccattctgtgtgaagtgttatgaggaaggtcatatcactatggctaccgtcgtggatcatatcgttccgcatcgtggagaccagaaactcttctgggatcgtgggaactggcagcctttatgtgagcatcatcataatgtaaagacaatgacggaagatagatatgtggagtacaagttttgagagtgagggtagggggtatttgaatctctacagcccttaggctccaagaccggcgccccctcttctgtgcaaaatcgcgaaatgaaagatgggggtatgaggttgacaaattgacaaattggatgtattatacaggtatcaattgataccttgacaggaggcgagaaattggctgaagaaacaaaatcacgtatagagagtgaaatcgaagtaaaagcatatattcaggatttgaaatttgcactcaataatggggctaagatagattttcaagcaaagcgcctcgttgatgaaaagcgcgatgaaaaatatactaaccaatacactgttaataaattattttctgatgaaaatcctgtggatgccttaaaacgcgaattattgacactatctgtggaagactatatgcagacagtaaaagacattagatttcccaaaagaagtgaaatgagagaatttggtaaggtatataacggcacagatgacgtatatattaaaataagagtggaacttttaggaatgtatggaaacacaacaacttttgttatgtcatttcattttgctgagaaggcatttacaccagaaatgtttccttataagaagaattagggggtgttttcatggatatgaagatcttaaaaagtgaaaaaagactttgtacatgttgcatggaagaacatgaagtgaaaacagttcttgttatggataaggccacttttaagaatacagaagtagattatgaagcctattatttgtattgcgatttggcagaagaactgtatatggatgaaaaacagatgcaggataatgatactagaatgaaggattcatatagagaaaagaaaggtcttttgacatcaactcagataagcggaataagagcaaaatatggtattagccagagcgatttatgcgtattgctggggtggggcggtaaaaccattaccagatatgagagccatcaggttcaagataaagctcatgacacaattttaaagaaaattgatcaggatccagaatggttcttgtctttactaaatgatgcaaaagacagcttatcagctgagtcttatcaaaaatatatggaggcggcaacttcattatttgaagaggatcaagatgcatatttgagaaaagctattgaggcaagttatgcaggatttcagggtaataagatgtttcatggaaatacttcactttcacttgataaggttgttgatgtgataagatattttgctgtttcttctaaagttacaagtctttacaaagtcaagttgatgaagcttatgtggtatgcagatgcgttggcttataaaagaagaggacgtgctattacaggattggtttatcgggcattaccaatgggagcagttcctgtagggcataattcaatcattgacttgaaggatgttccttgcgaggaagttgatatgggcgaaacaaatgcttatcatttcgctttaagtggagaatgcaagttttcagcattatcaaaagatgacaaggaaatactggatttagtcatagataaacttggtaaaatgagtaaaaatgatattattgcatttatgcataaagagcaggcatatgttgaaactgcccctagggatgtcattcagtttaaatatgcagaaagcctacaaatttaattaatggaaatattttttgaggatcatgtagagatacatggtccttttattatgcaaaaaattaagggaggagggtatgaccatggcaggaagaaagccaaagcctacagctttgaaaaagctggaaggtaatccgggaaaaagaaaattgaatacgaaggagccaattccggcaaagggaatgcctaactgtccggaatggttattacctgaggctaagaaagagtgggaacgtttagctgatttgatgaatcagatgggtgttcttacggaagtggacatggcggcatttgctgcatactgccagtcctatgccagatggaaggaagcgcaggagcatatagattctgggggttcgacctttgaaacggataaaggatatcagcagcagacaccttgggttgggattgcaaataccaatcagaagctgatgctgcaggcggcatccgagtttggacttacgccttcatccaggtcacgtattgtggctggtagtgcaaagggtaaggagtcggaagatgagatggaggcattgcttgggggtgattcctaatggcaaaggaaccaagaccaaagggatatccgaagcttaaaaattataaaccttcccagttcatgcttccgacttcacattatgataagaagaaagcagacagggcagtgacctttattgagaatctttgtcacaccaaaggtaaatgggcaggaacaccattctggctattaccgtggcaggagcaattgataagagatatattcgggattgtaaaacctgatgggaacaggcagttccgcactgcatttgtggagatatgtaagaaagtgggtaagagcgaattagcagcagcagtcgctctttatttattgtatgcggacaatgagccttccgcagaagtgtatggtgcagcggctgacagacagcaggcatccatcgtatttgatgtggcaaaacagatgatagagatgtcaccggctctgatgaaaagaagcaagctgatgggagccaccaagcgtattgtgaattacagtaatgccggttattatcaggtgctgtcagctgaggttggcggtaaacatggattttcggtaagcggtttggtatttgatgaaattcatacgcagcccaacaggcagctgtatgatgttcttaccaagggctcatcggatgcaagacagaatccgcttcactttattataacgactgcaggtaatgatagacattccattgcttatgagcttcatactaaggcggtggatatcttagaaggcagacgtgtggatccgactttttatcctgtggtctatggacttaaggatgatgaggactgggaagatgaagaaaactggtataaggtaaatccttctcttggatataccgttgatattgaaagactgagagatgcatacagggaagcaaagcagaacccggcggatgagattactttcaaatggcttcgatgcaatatgtgggtgagttcaaccgttgcatggattccagatgcgatatatatgagaggaaatgaatcaattgaggcggcttcacttgaaggaagagactgttatgcaggacttgacctttcaagtacaggggatattacagctttagtattgatatttccgccgagagatgaaaatgaaaagtatgtgctcttgccgtacttctggattcctgaggaaaccatacctagaagagtgaaagctaattcagttccctatgatatttgggaaaaacaaggctatatcatgtctacagagggaaacgtgattcattacgattttattgaaaagttcatcatctacctatcagagaaatatcacattttggaaatagcggtggatagatggaatgcgactcagatgattcaaaatttggagggcgaaggttttaccattgttccttttggtcagggattttcttcaatgttagctccgacgaaagaattctatcgcttactgatggagggaagaattattcactgtgggaatccagtgcttagatggatggcaggtaacgttgttattgacacagatcctgctggcaatattaaagtaaccaaagctaaatctaaggagaagatagatggcattgttgccgcaattatggcgcttgatagatgtatacgtcaggaagggcagagtggcagcgtttacgatgagagaggactgttggtattttaaggagggtgtatgggatttttcagtaatttatttcgggggagggatgctccttctaacagcacagctggaagtggatatggattttttatggggagcacagcttctgggaagagagtgaacgcacggagtgccatgcagatgactgctgtatattcctgtgtgaggattctttctgaggcggtggcgggtttgccactgcagttttacaggtataacgataacggaggtaaggagaaggcggtggatcatccgctgtattttctgctgcatgatgagccgaatccagagatgacttcttttgtgttccgagagactctgatgacgcacttgcttttgtgggggaatgcgtacagtcagatcatcaggaacggaaagggtgaaattgtggctctttatccgctgatgcccgaccggatgacggtggacagggatgagcatggcaggctttattatgagtacctggtttatgacggggatgatgtggatggcagaaccgggacggatccgaaagcgaatggaaagatcgtgcgtctgcatccggcggatgtgctgcatattccggggcttggatttgacgggctggtcggatattcacctattgccatggcgaagaatgcgatcgggcttgccattgctgcggaggagtatggaagcaagttttatgccaacggtgccgctccgtcaggagtgctggagcatccggggactttgaaggatccgggcagggtgcgtgagagctggcagtccactttcgggggaagcagcaatgccaataaggttgctgtcctggaagagggaatgaagtatacgccgatttccattgcaccgaatgaagcccagttcctggaaaccaggaagtttcagattgatgagattgccaggattttcagggtgccgcctcatatggtcggggatctggataagtccagtttcagcaacattgagcagcagtctctggagtttgtgaagtatacactggatccctgggtgagccggtgggaacaggcaatggtcagggctctgctgtctgcggaggaaaagaagaagtatttctttaagttcaatgtggatgggctgctcaggggtgattaccagtcaaggatgaccggttatgccacggcaagacagaatggatggatgagtgccaatgatatccgggaactggaaaatatggaccggatcccggaggagcttggcggtgatctgtatctgatcaatggaaatatgacgaaattacaggatgccggtatctttgccggatctggaaaggggaaggatactggtgaagaagttttggaactggaaaaagaaagcgataaatttggaaagcggacaggaagctgaggaaagaatcctgttcatgaacggggttatcgcggaggagagctggtttgacgatgatgtcacgccggctctttttaaggatgagctgaatgcgggaacaggggacattaccctgtggatcaacagtccgggcggggactgcgttgcggcggcacagatctttaacatgctgtcggaatatccgggaaaggttacggtgaagattgacgggcttgcggcatctgctgcgtctgtcattgcaatggccggaactgaggtgtggatgagtcctgtgagcatgatgatgatccataatccggcaacggttgcatggggcgaccatgcagagatgaagaaggctatggaacttctggatgccgtgaaggaatctattatcaatgcttatgtacggaaaacgggccagagcagggcgaagctgtcacatctgatggatgcggaaacgtggatggatgcgaataaggctgtggagcttgggtttgcagatgacattctgttccagaaagaggaacagggcagtgaaggcgaaaatggagatccaggtgctggccgtacagaaaacgggacgtctgattctgtaatgttttccagacgggcagtgaataatgcgctgatgaataagctggagaggcattatggaaagaccggaaaatccgtgaaagatcaggcgggaattgccgcaccaaaattaaatagtgttgacacagggcgttctgcggatgatctgcgtgaacgcttaaattttatcaaaaaatatatctgaggaggatacggattatgacgattcaggaattaatggagaaaagagctaaggtttgggaagctgcaaagaattttgtggatacccatgagaatgaaaatggtgttctgtctgcggaggacggtgcaacttatgagagaatggaatcggagattgaggatctgacaaaggcgattgaccgccaccgcaaggcagaggaaatggaaaagaacctgaaccagccggtaaaccagccgctgaccgggaagccttatgcaggcggccagggtgagccaaagacaggacgtgcttctgatgaataccgcagggcaatgctgaatgcactgagaagcaacttccgccaggtttccaatacccttcaggagggcgtggatgccgacggcggttatctggttccggaagagtatgacagaagactggttgatgttctgaatgaagaaaatatcatgcgccgtcttgccacaagaatcgtgacttccggggagcataagatcaatattgcggctaccaagccggcggcaagctggatcgaggaaggcggggcgctgactttcggggatgcgacttttgaccagaagatcctggatgcacataagcttcatgtggcaatcaaggtaacagaggaactgctttacgacaatgcttttaatctggaaaattacattattgttcagtttggaaaggcacttgccaatgcggaagaggatgccttcctgaacggaaacggaacagggaaaccgaccggtatttttgacggaacaggcggagggcatctgctgaatacactggctgcagctttgaaatcagatgacatgctggatctggtgtatggcctgaaacgtccgtaccgtaaaaatgcatcctttatcatgaatgatgcaacactgccttcccttagaaagctgaaggacaataacggtgcttatatctggcagccggcttatcaggcaggggaaccggacagaatcctggggtataaggtggagacttctgcctatgcaccgaaggacggcattgcttttggggattacagctattacaacattggtgaccgaggaaacagatcctttaagcagctgaatgaactgtttgcaggcaatggaatgatcggttttgttgcaaaggaacgtgtggacggaaaactggttcttccggaagccgtgcagattatgaaactgaaggcagactgattttttgaataaggggaccggcaggagaagtacaggcctgccggttctgttttgaggtgatgcagttggcagtgacagtggatgagatgaagaattacctgcgtgtggattttgaggatgatgatgcgctgatcggggatctgatcaggcaggggcagcagatctgcatggatgtggcaaggattgtggatgaggatgagtttgaagatctgcaggggacgaagattgccgtgcagtatgcggctgcctatctgtatgaacacagggaggaagcggatcaccatcagctggtgatggatctgcggagcctgctgtttggagtgagaaaaccgggattctgaggtggttggtttgaatattgcattgatgaatgaaaaggtgatttttcagaaatgttctgttgtaaaggacgggatcggaaatcacaggaatgagtggacagaggattactgctgttttgctacgataggcggtgaggggcttgccagttccagggaagcggaaaccgcagggactgtggtggaagatgtgggaatgactgtgacggtgcggtactgtaaaaagactgcaggtatccggtctgttacccacaggatcctgtttcgggatcaggtgtatgacattgtgagtgtggatcatctgaattataagaagaagtgtctgaaattcacatgcaggaaagtccggaggtgatcagatggcaggggacagatgtacggtcagccagatggcggatgtgattatggaaggcatggaagagtatgccagacttgcggcggatgatgtgaaaaaagcagtgaagaaggcagggacacaggcaaggaaggatatccaggagaatgcccctgtgaagaccggtgcctatgcaaagagctgggcggcgaagaccacgaaggaaactgccaatgcgatggaaatcgtggtgtattccaggaacaggtaccagctggtccatctgctggagttcggccatgcgctgagaaaaggcggcaggacaagggcgtttccccatattgcgcctgcggaggaacgggctgcgcagactctggaacgggaagtggagaaggcactgaggtgatcaggaggtgaaagcatatgacactggaagaactggcagggatgctggaaaaggctggttttccttttgcttatgaccattttgcagaaggggaaagcccggatccgccgtttatctgctatctgcttcccggcagtgataattttgcggcagacggacgggtatacttccggatcagtgaagtaaggatagagctatacacggaccggaaggatcccggggcagaagccctggtggaaacagttctggatgatgccgggattttttataataagtcggaggtctggatccagagcgaaaagctgtatgaggtgctgtacagtatggaactgtaatgatttgtttaatgatggagggataatatgtctgataagaataacaaggtgaagtataacctgaaaaatgcgcattacgctttactgacgatcggggaggacggggcggtgtcctatgcagcaccagtgccgcttccggggtccgtatcactgtccctggatgccaacggggagccggagaatttttatgcagatggcattgcgtattatgtgatcaacaacaatatgggctatgacggggatctggagcttgcactgattccggagagtttccggacggatgtgctgagagagaagctggatgccaagggcgttctgattgaaaactcggacgcagaactggcactgtttgccctgctttttgagtttgacggggatgtgcgccatatccggcacgtgatgtataactgttcggcttcccgtccgaagattgagggcaagaccaacgaggagaagaaggaagtgcagacggaaacgctgactattaaggccacgccattgtcggatggaaaggtgaaggcaaagacagggaatactacggatgcaactgtttatgcagactggtataagtcggtgtatctgccggctgcagatccggcttctctgcaggctgccgatggcggaaagtctgttgtggatgctgcaggaaatggaaaagcactgagctgaggagaattcagatatgagcatgatgaagaagattgagattgacgggaaggcgattgcttttaaggcttctgccgctattccgcgtatttacaggattaagttccagagggatatctacaaggatttatctgttttggaaaagagtattggggacggagacccggaaaagtcctcactggatctgttttcccttgagatgtttgagaacattgcgtacgtgatggcgaaacatgcggatccgtctattccggataatccggaggaatggctggatgagtttaacacattcagtatttatcaggttctgccaaagctgatcgagctgtggggaatgaacatcaggacggatgtggaggctaaaaaaaactttatgcaacagaccgtgaaatgacaactcccctgtttcttctccggtgtgtgcagctgggaatttccatccgggatctggatctgctgactatcgggatggtgaatgatatgtttgtggagagcaggaacgatgagtataagggatggagaaaggttgccacacaggaggatttcgacgtattttaacgataatgaaagcatttgtcaggcaggtgctttttttgtgcccggagtgatccgggtatttttgtgcttttttttatggaatttagggggtgagccgtatggcagggaacagaattaagggaatcactgtcgagattggcggcgataccacaaaattgcagactgccctgaaaggggttaatacagagatcaggaatacgcagagccagctgaaggatgtggagaagcttctgaagctggatccggggaatacggagctgatcgcgcagaagcacaggctgctggcacaggcggtttctgagacaagggaaaagctggagactttgaagactgcgcagcggcaggcggatgaggcactgcggaacgggacgatttcccagcagcagtatgacgggctccagagggagatcgttgagacggagcaggaactgcggagactggaacagcaggcagagcagtctgcaactgctttgcagaaaatcggggcaaccggtgagaaactgcagacggttggaaacaagatttcttctgtgggacaaaaactgcttccggtgacgggagtggtgacagggcttggaacggcggcggtgaaaactgccgctgattttgactctgcgatgagtaaggtggcggctgtgtccggggcaacgggatctgattttgataagctcagggacaaggccagggagatgggtgccaaaacgaagttttctgcgactgaggcagcggatgccatgaattacatggcgatggccggatggaagacggaggatatgctgtcaggtattgaaggcgttatgtatctggctgcggcatccggggaagaccttgcaacgacttctgatattgtgacggatgcgctgacggcttttgggctgactgcaggggattcgggacattttgcagatgtgctggcggctgcttccagcaatgccaataccaatgtgtccatgatgggtgagacgtttaagtactgtgcgccggttgcaggggctttgggattttcggttgaggatacggcagaagctatcgggctgatggggaatgcgggtatcaaggcttcccaggctggtacttccatgcgttccattatgaccaacctgaccggggatgtgaagctgtcgggtgcggcgatcggggatgtgaccattgctaccacgaatgcagacggatccatgaggagcctgtctgcgatcctggctgactgcaggggagcttttgcaggaatgacggaagctgagaaggcgaacaatgcggaggcgctggtcggaaagaatgccatgtcaggtttcctggcactgatgaatgcggcaccagaggatattgcaaaggtgtccggggcggtgaataactgcaaggatgccgcaaagaacatggcggacaccatgcaggataatctggaaggacagctgactattttgaagtcacagcttcaggagctggcgatttctttcggggatctgctgatgcctgcggtgcggagtattgtttccggtctgcaggggatggtggatgtgctgaatgccatgccggacggggtgaaacgtgtgatcatgatcgttgcacttctggctgcggctctgggtcctgtgctgatcatcataggcaagaccctttcggccattggaacgattatgacatgggcaccgaagcttgccggtgcgatcagcgcggtgaagggtgcttttgcggcgctgagtgccacgatgatggcaaatccgatcgctattgtgatcgctgccattgcagctttagtggcggcgtttatttatctctggaatacgaatgaggagttccggcagttctggatcaggctgtggaatgagattaaggaagtcgctgtccgggtatggacggcggtttcccagtttctggtttccgcatggaacgggatccggaatacggcggtggctgtatggaatggcatcagggatttcttttccggtctgtgggctgggattaagacactgttcacaacggttgtcactgcaatttctactttccttgtgggagcgtggaatgggatccgtgcaacggtcatggcggtgtggaatgcgatttcagcatttcttggttctgtctggaatgggattaagtctgtcattacgaatgtggtgaatgggatccggacatttttgcagagtgcatggaacagtatccgcacagtcattactacggtgatgaatgcgatccggacggtgatctctacggtctggaatgggatccggacaattatttctaccgtgctgaatggaatcaggggtactgtcaattccgtgtggaacggaatcaggaacacgatttcttctgtggtgaacgggattaagaatacggtttccggcgcttttaatgccatgtggtccggaatccggagtacgatttccggaatctataatacgatcagggacggtctgggaaatgcggtgaattacattacgggtcttgcgtctgccggatggcggtggggcgcggatatcatcaacggcattgtgaatggtatccggagctgtattggtgcagttgccaatgcagtgacggatgtggcaaatacgatccgttcccatctgcatttttctgtgccggatgaaggacctctgacggatttcgagagctggatgccggattttatgagtggtctggctgagggcattgagaagagcaggggaatggtaaaggcggctgtgaacagtgtggctgcggatatggtggtttcgccgcagatggctgtggcagatggcagtgtgatgaccggtatgggaccgtccggcggagcggatctgacggctggcattgtgtcggcgttgaaggatgtgctgagtgatcagaagggacagcaggggaatctggtgattcctgtttatctgggaaaccagctgctggatgaggtgatcgtgacggctcagcagagaatgagtctgaggagcggaggtagataggatggctttttttcagtatcttgtatttgacggggagaacctgccgcttccggattcttatgaggtggagctggaggatgtggaggcggattccggcggtgagacggaggcagggacgacacagagggatgtggtgcggcatggtgttgtgcggatcccggtgtcgttttctgttacggcgaagtggcttaagaagctggcagggtatgcgaagctggataagatcagcgtgcagtattttgatgtggagacggcggagctgaaactgtctgagatgtatgtgactgggtataaggcgaagctgaggaaagataccagttataaggggctttggacggtgagttttacgttgaaggagatgtagcgagatggtataatgggagaatcaaatcggaatttaaaggagaataaaaaatgaagaaattgatatttgggttggcgtggcagataatgggctttttgggggcgattataattctttgttcggcggcacctcatcaatgggattataacggtataacaggcattgtaggcagtttgttaggattagaattgatgataccgcttgtcgtttgcatagtcatcttcattattggcggtgtgttttgttacaaaggaatacaagaaaagtgaacaaacaattctaattgaccgaggtggaaaaatcatggaaaaagataaaaaagagaaaatcaggtgtatatgttttttatttgcttcaatatgtttctttatagtgtcgatagtgaattttatggataaaaacactacactagcagtaacatatttattattaggcatttcatttttgcttttatctactacgaatttgagaaaaaataaataaataaataaatacaacttcaagcttgtcgagctggaaaatttgaatttaatggggaggaggcatgatatgaaaaaaacaagccttgctgctgtaatacttgtcgggttagctgccgttatctggacaatcagggctgtacttgaaattgttttaaaaacctataatgagtcagttttcttgtttgtactgaatgtcctttgttcggttgtatggattgtgtcatttatcgtgaatctgaaaaggtatcgttccaatagagaaaataaataaataaattccagtctgtcgagctggaaaattgaatttttggaggtgcgttatatgggacggttgaaaagagcgttgagcgttgcaatcccgcttgctgtcgttatcatcggtatcagttataatagttatgttaagatgcacacgtttactctttcaggtaacgagacagtgaagagcgaacagatacagcctgttaatggaagcgtaaaagttactgggactgctgataccgatgtcgtatttacggatatagaaagcggagaaacctatgtaataggttacattactcatggagccggcgatacaattcagcttgaacggggaaaatggtacaaggttgaaggcgctggagaacttacagtgaggccggttaatattcgtatagaataatccccccccggtttgggggtaacaccatgaaaaagcagtaacagatactgaacaccatactatggagtttttctggtgtttttatagtaatcagtgtggtgatatttttcgtaatcgtgcagattatcaaaaagaaaatgaagtagaaaagcatgaatttggcaaaggagcgtgattgtatgaaaaaaatgatattgggaattgtgtggcaactaatggggtttcttggttcaataattatcctatgctctgtggcaccgcacgagtgggattataacggaattactggtattttaggcagtttgttggggttaggcttaataatcccactcattgtttgtattatattttttatttgcggtgtagtggtctgtttcaaggcaataggtgaaaagtaaatttccagtttgcagggcaggtggctatcatggagatgaagaagaatggatgagaggaaagcgtattggtttgaacagccatatatgccgcggatgaaaaatattgcagtggctcctgttattctggaagatggaaggctgtctttctgtgtttcgggggatggtggtcctccgtggtcaggggtgtggaacctgacgggaaaggcagttctggacggggatgattatttttacgaaggcatcagtcagttggctggtgcttttttcgtggggaaatggaggtggcgggatgtatcctgtgtcggatgcttttctgagggcagtcaggagtaatacaagaaaatatttctggacgggtacgatcgttaccaaaggcagaatgacgtatgagttcggggctaaggagattgtgaaggggtccgggtatatttccaggcagtgctgcgggagtacggagattgaactggggacggtgtatgcggcggagatggggattactcttctgagtgacattgacaggtatacactggaggatgcactggtgacgattgtgtttcatctggtgctggcggatggttcggtggaagatgtgccgatgggagtttttgaggtcagtgaggcgaaccggctggcaaagtgcctggaactgaaagcatatgattttatgctgcggtttgataagagtttcaacgggtttgagactgtggggactgcttatgattttattgccctgtgctgtaagagatgcaaagtggagtttgcgaataagagggcggagattgatgccatgccgaatggcggggtgacgatttctgtttatactgaaaatgatattgagacctgccgggacgtgctgttttatgtggcacaggttctgggaggtttctttattatcaacagggaggggaaactggaactgagaaagtacgggaaggatcctgtgatgaaggtggagcagagacaccggttttcttccagtttttcggattttatcaccaggtacacggcagtgagttccacgaataagcagacgcagattgcagagtattatgctctggatccggataacgggctgaccatgaatctgggggtgaatccgcttctgcagtttgggttaaaggagaccagggagatgctgtgcaggaatatcctggcagatctgtctgtgatccggtatgtgccgtttgattcggatactattgggaatcctgcactggatccgggggatgtgctgacgtttgcaggaggacaggcggatgagggacagatcacctgtatcacttccatcagacagaagatcgggggaaagcagaccctgaaatgtgtgggaaagaatccgaggctggctcaggcaaagtcaaggaatgataagaatatttcggggctgctgaaccagattgaagacaatgcgaagacggggaagatcgggatccacacgtttaccaatgcttccgcacatgagatcgggcagacaaaggtgaagctgatcagtatccagtttgcttcttctgaggaaaaccatatgcagttttttgcacaggttgttgtggatgtggctgcggatccggtggaacggtctgcggaggcttccgggactgtggtgattccgttttcaggtggaagtagcagtggaactggaagtggtacgggtggttctgatggaaccggggtggcatcggatgcaggaaattctgaaaatgatgcggcagggaatgaagttggaaatacttccgggaatgagaatacagggagtacggatgatgtctctggtggatcagattccggatccggatcagggggtggttcggaggtttctgtggatgtgtgtctgccggtgaagtggcaggaggatggacaggcgttctgtcatgtggtctttgaatttaataatgaggagattgtggagcattgtccggtggagacctggcattccgggaaacatattttgtcactgtattatcccattgagaagatcgttgccaattatacgaatacgttcaatgtgtatctctggatggagaatggcagtgggacggttgatgtgggagactgcattgcttctgtcagcggacaggctatggctgcaggggaagcctgggacggaaagcttgaggtagaagattataccacgagatttgccattggcggaggcctgaatgtgaatggcttccgggattcgctgtccatgcagatgaaggagacggtgaacagaggctttgaggtgtattttgctgagagagcgggaatcagcggtttctgcaggcctgtagaaatggagggtgtgtgatgaagttaaaaggtgaaatggtcattgaactgaccgatacgaatacgggtgcggtggaaactgtgcaggagacgaacatgatcacggaggcagtgaataatattctggggctgaatcccatggggatttatctgaaagccagtggggagtatgacaattctgttctgtggaacgggacgctgcttcccatctgcccgaacatgatcggagggattctgctgtttccggcagtgctggaagaaaaggcggaccatatttacgagcaggggaagaacctgcctgtggcttatgcttccaacaatgtaaattccggttccaatgtggcgaggggaagtctgaaccagacggagagcaagaagctggacaatggatataagtttgtgtgggagtttactcccagccaggggaatggaaatattgcggcggtggcactgaccagtgccctgggcgggcagaatgcttttggcagtgcggcaggggatgctagcacgttcctgcttctgaaaaaggtggatatcggggatatcccgaaggcgaagcagatgacactgtttgaggcagtggagctggattttgaaaagaacctgctgtattccatcacctttgggacttccagtgtgaccattacgaagatccggatcccggtgtttaacatcgggctgaatgagaagctggatgataccacttatactgtactggaagagcagacactgacaacggaaagcttcacgttcctgggggattatacaaagtacggggaatttatggacgggcatgacgggtactggtatggattttccaatgagccgaattcttccggggatgcgaagatggtgtggatccggatctccaaaaaggattattcctttacagaaggaagctggacactgtccaaggcgaagctttcggaagtgggcacaagggcaaaggacggttcctatccggaacggaatgtaaaatgctgtgtgaggaaggggtatctgtatgtgccttcttacgataagaagggagtttataagatcaatactgcaaattcagcggatgtgacactgatcccgctgggctttacttccaagctgaaatctttaggcgaggctggttcttgtgaggtgtacatgacgcttctcggggatatgattgtggcaggggatttccagattacggcggatgacagggtgatcaagacacaggggagcgcaaggtttgaagctatggcaacgcctttgttccagtataagaattttgtatttatgtggggtggcagttacgggaaggaacacaggtgtgcttatcttctgacaccttatctggcaagtatcaataatctttcgtcagcggtggtgaagaatacggacaagaccatgaagatcacgtatacgctgacggagaaaacaatgtaggtctttctgccgcagggcatggagatagaaaacttatttacggcagttctcagaaatgggagctgcttttttcatgggaggaggattctggcatgaaggaattttggaactttattcagatggtttttatggctgtaggcggatggctgggctggtttatgggaggctgtgacgggcttctgtatgcattgatcgcttttgtggtgatcgattatctgaccggggtgatgtgtgcttttgcggaccatacgctttccagcgaggtgggattccgggggatctgcaggaaggtgctgatttttctgttggtgggaatggcgaatattctggatgtggctgtgatcgggaacggatctgtgctgaggacagcagtgatctttttctatatttccaatgagggtgtgagtttgttggagaatgcagggcatctggggctgccgatcccgcagaagatgaaagatgtgctggaacagctgcatgataaaagtgaaggagactccgatgatgcatcagagaatgaggtaggaggtgagtgattatgggatacagtaatagttctttggtggcgtacacgttgctcagtccgaatcattccggactgagaacggagcagattgacagaatatcgccgcactgtgtagtaggtcagtgtacagcagaaggtctgggggactggtttcataaatcttctacccaggcttcttcgaattatggaatcgataggaatggccgggtcggattgtatgtggaagagaagaatcgttcctggtgtacttccagtaatgcgaatgatcagagggcagtgacgattgaatgtgcttctgacaaggcggaaccgtatgctatgcatcaggtggtttatgaccgtctggttgatctgtgtgaggatatctgcagaagaaatggaaagaaaaaactgctctggtttggtgataaaaataagtctctgaattatcagccgaaggcggatgaaatgcttattaccgtacaccggtggtttgcgaataagagctgtcctggagactggctatatgcgaggctgggcgatctggctgcgaaggttacttcaagacttggcagcggaaatgtggaagtgattccatcagggatgcaggcaggggaatttcaggggctgacagaagaacaggtgcttgcgaaggttggcccactgtttaccgcagatcagaaaaaatcagggattcttgcttcagtgtctatggcccagtttattctggagagcggttatggaaagagtgagcttgcgttgggagccaataactgttttggaatgaagaagtcactttccggtaatacctggagtggttcagtctgggatggtgtgagcatttataaaaagaagacacaggagcaggaggaagatggaagctatgtgacagtcacagcagaattcagaaaatatctgaatgtggatgattccattgcggatcacagtgcttatctgcttggcgctaagaatggagagaagttccgatatgacgggctgaaaggatgctcagcttataagaaggcagtgcagatcattaaggatggtggttatgctacgagtcttacttatgtggagaaactttgtggcattattgagaagtggaatttgactaaatggaatgtaaagccttcgagctcttctgatattgtggtgaagtattacagggtaaggaagaattggaaggatgctgcttctcagcttggtgcttatactgtgcttgacaatgctaaggcgatggcggagaagcatgaaggttatacggtatatgactggaatgccaatgctgtgtatggtgctgaggttgatgttgaatgtgattctgatatagagttttctaatgtggattgcccattcatggtaaaggttgacattgatgatctgaatatcaggaagagtgctggaacgaatactgcgaagactggaaagtataccgggaagggtgtatttaccatcatagaagtgaagagcggaaagggttctgataaagggtggggaaggttgaagtctggagcaggatggattagtctggattattgtcagaaaatatagagaatgttatttttacgattatttgcggattattatatagaaagaattttaaaaacggatatccaaaaatgcttgacaaatataggatatccaattaatatataattattggatatccataaaataatagaaggtaggtgattttatatggcagggagacctccaaaggaagacagcagggataagcagtatcgagtacgcttaaatgatgcggaagatgagatgctaagtttttgcagtgaagagactggtgaagccaaatcagaaatatttaggaaagctcttaaagcgtattacgagaatacaaagtatttcaaaaatattctgaaggatagagagggatattctaaaattgattatacagatgacatggaatacgacgaatacgaggattatggaatggatcatatatctttgaagagagctatagcatgtccttattgtggcgccgagaataatatggattttgaagaagactgcgagagttttgatgaagaaaggcaaatgggacctcaaataacgtatacttttgattggcctgattgtgaatgtgaagaatgtggaaaacgttttagagtgagcggtagtatatgggaatatcccatgggagcatacaattacgaggatattgacgttgaaatatatgatgacgagattgaagatgaataatatgaagggacagtgagctgatggagaagaaattgacagcagaattaaaggcgctaaaggaagaatttgattttatccataaaaagattggagatttagaatgggaacgtgcaattagattctatggaaagaaagctgttttaggctctgatattgataagatagatatgcagattgaaaactatagagacaatatggttatacttatcgagaagatagaaaaagcggtgtcagaggcaaataaaatagaaggagaaatcaaatagcgaaaacttagacagatggcctgtagatagagatatctgcaggtcttatttttttgtcttttttgcgtcattcaccggaattatctcggcaaaaggcgcttaggaagatagaagagaagaaccttactatcttatggaggtgtcgatatgaccgagaagagagaactgccttggtggcagaaatacacattaacactgaatgaagcatcggagtacttcggtatcggatacaagaaattgaaactctttgttcaggaacattcagatgctgactttgttctctggaacggcaacagagcgctgattaagcgtgagcagtttgagaagtatatggacagtcagatgaatgtgatttagttcaaaaaagtttttaaatttcttgtggaaaaagagctttgtctgtggtacactatcaatacatagtcggatacatactatgtgctatatgaattaagcagcaaggctctcccgattttgaaaggagacgatgttcaatgagcgaaaaacgacgcgatagtaaaaatcgcattcttcgcacaggagagagccaagaagcggatggacgatacaagttccgatatatagatggcaatggaaagcgtaagacggtttacagctggagattggtagctacggatagtatcccagccggaaaaagagataatgcacctttacgagagcaggagaaagcaatcaacagagatttgaatgatatgattactcctgatggcgcaggcttgacagttcttgacttggtgaagaaatacattgcaaccaagacaggcgttaagcatacaaccagagctggttatggtactgtaatcaatttgctgtataaagatccttttggcgcaagacgaattgataaaatcagattgtcggatgcaaaggagtggttaatcagattgcagcaggtggataagaaaagctattcggcaattcattccatcagaggggtagttagaccggcatttcagatggcagtggatgatgatatattaagaaagaatccatttgaatttcaactggcaactgtggtggtaaatgatgcggtcactcgtgaggccattacaagaaaacaggaaagaactttccttgatttcatcaaaaatgatacgcactatagcaagtattatgacggtatgtacattctgtttaagacagggatgcgtatttcggaatttacagggttgacggttaaggatttggatatggagaacagaaccatcaatattgaccaccaactgcagaagactggaacgttggtctatattgatacaacaaagacctacgccggtacaagagtaattccgatgcaggatgatgtatacgaatgctttcagtgtatattgaaaaatcgcagaccaccgaaggtagaacctatgattgatggttattccggtttcctttgctttgataaggacggtaaacctatggtggcaatgcattgggagaaatatttccagcatgcggttgacaaatacaacagcatctatcgtgtacagcttcctaaaattacacctcatgtatgcagacacacatactgctctaatatggctaagtccggaatgaatccaaaggtactccagtatctgatgggccattcggacatcagtgttactctcaatacctatacacatcttaagctggacgatgcgagggaagaagtggagaagcttgctaggaagcaggcagaagctgaaaatgagtttcggcagttaggtatgaaggaggacaaggtcaaattcaagaagatggggtaaatggtctaatttagaccatttcgtaaaatggctagaaagtcagtaaattcaaggctttgaagatggtcgtggtctaaaacagattgaaaaagggaaaaatttttagaccaaattttttcggaaaatcaaagatttcagacataggagaacggcaaatgtcggctggtctaaatttgaaatctgaggccattttagaccatattttagaccatttgaaggaagaaacataccgagataagccgaaataagccgagaaatgggaaaaatcttgatagactgaaaaagtgcgcaaatgcttgaaaaataaggaaaaaccgagataatccgagataaaaaaggagttaaaaatagatgattagagtactattcgtctgccacggcaatatctgccgctcaccaatggcagaattcatttttaaagacatggtttccaagcaaggtctttcagaccggttttatatcgcatctgctgcaaccagcactgaggagatatggaatggaatcgggaatccggtatatcctccggcgcgagaggagcttgctaagcatgggattgattgtaagggtaagcgcgcagttcaactaacgaaggcagattatgataaatatgattatattctcggtatggaccactggaatctgaagaatatgttaagaatattgaaatcggatccagaggacaaggttaagcttcttctggattatagtgatgatccgagggatatcgcagatccatggtatacaggtggatttgatgtcacatattcggatgtggtggagggctgtgaggcttttctggaatatctgaaagataaaaagaaactgtaataaatattgtcgatgaaatttactttacaaatagctgtggctattttatactatgtctacagcgactcttaagggggctttcgctcccttattttcttttttccgaaaacggaaagtcaacattcaaatcagggcatcctgcccgtattattttcaaagcaagaaaggaactgaatatgcagaaagactatgaaacattcgtagagaaactggagattggtatttacgaggctacagggattccgagggaaaatatttcttttgagaaagaaggcgggaggtttgcgcctgtaggagacagactgctggtgaagtttgcagagcatgatgatgcctgggaggtctgtggactttatacacaggaactttttaaatcttatcagaatggcagtccgtttgaggaaattataaaagaaatcacagatgatctgaatcggataaaaaaggcggatatttatgagaaaacaagagtgatcagggattatgagaagacaaaaccccgcctgtttataagattgctgaatgcagataaatattccgcggatcttcaggatgcggtgtataaaactcttggtgatattgcacttgtgctttatatgaaagttacggaatatgaaggatgtgtgacaagtacaaaaatccggcagggaatgctggagcagtggggaaaagaatgtgatgaggtgtttcaggaggcgattctcaatacgtattttatgagtccgcccagaatttacagatgggaacagatgatttttaatccggaatatgaaggtgaaagttttatgaatctgggtgataagtgtgaattgaagaaagatgcaatgggaaattgtctcagtacaacgaagaaaacaaatggtgcagttgcagtgttcctgccgggagtggcagaacaattggcatatatgctggattccgatttctatatggtgtttaccagtgtacatgaggtaatgatccataatgataaatttgtagaacctgaagatttgcagtgtgttttgcgggatacgatcagggaggctacaccgaaagaggactatctgacgtcgagaatctaccagtacaatagggaaacacataaatttatctgtgtaactccgctggaaaaagatgagaaataaaaatatgagagtactccataaaaaagtactctcatataaaggatatttagaaacgttatgagtaatttatacggttatccgagcagtgcagagtcattgctgaactcttctccgcttgctttttcaaactggtccagaaggtttttaactgtcagttttttcttttcttctccctggatatccagaatgatttttccttccatcatcatgatcagacgattgccatgtgcaatagcgtccttcatgttgtgagtgatcatcaatgtcgtaaggtgatcgcggtttacgatcatatctgtaatttccagaactttggcagctgtttttggatcaagagctgcggtatgttcgtccagaagcagaagctttggtttctgaagcgttgccatcagaagagtaagagcctgtctctgaccacccgagagaagtcctactttagaagtcagtctgtcttccagaccaagaccaagaattttcaggagctctttgtattcttcgcgctcagctttagtgattccggagcggagaagacgggattttccgcggcgttttgcaagtgcaaggttttcctcgatacccattgttgcagcggttcctgtcattggatcctgaaacacacgtccaaggtatgtagcacgtttatgttcagaaagttttgtaacatcaatattgtcgataaggatctgtccttcatcaaccggccaggttcctgcaacagcatttagcatagtagatttgccggcgccgtttcctccgataacagttacaaaatcgccttcgttcagcttcaggttcagaccatttaatgcacgtttctcattaatggttccgggattaaaggttttatagatatttttaagttcaagcatttttatttacctccccttttggctggtttattaaagtatttgcctttccagtatgggaatgcaaggaagagagcaactacgattgcggacagcatcttcagcaggtcagtgtcgatacccatccagataacaatctgaagtaccagataatacagaatggaaccgaagataactgctaacaggcgaagggcaaagttgcggaaaatacgtccaaagattgcctcaccaataataactgctgccagaccgataacgatggaaccacgtcccatgttgacatctgcaaatccctgatactgtgtaaggagtgcactggaaagtcctaccagaccgttggaaatcataagtccgagaactttattcctgtttgtgttgataccctgggcgcgtgacatatttgggttacatccggttgcgcgaagggaacagccaagctctgttccaaagaaccagtagagaatggcaatcaggagaatacacataactgctacaataaaaattgtgtttttggaaagagatgcattttttatatgtcgcagggaaaccagaagattatatttatcaacgttgattgcctgatttgcttttcccatgatcttcaggtttacggaatacagagataactgtgtcaggattccggcaaggattgcgggaattcccataaaggtgtgaaaaattccggtcgcaaggcctgccagcattccggcgagagtagcggccaacatagaaatccagacattatgaccggaaagcatcatcataatacacactgcaccaccggtgcacatagtgccatcaactgtaaggtctgcaatatcaagaatacggaaagtgatataaacaccgattgccataattccccagatcagaccctgggctactgcacccggaagtgcagtgattaatgttaaaatttgcatttgtaatttcctcctgttgagatgcgaaaagcgagagaggcgtcaaacctttcccgctgatcgcatataaattgaatttttataactgtttgataagctgttatttaaaatcctgttggtgtgagtatttttcaactgtctgaccggatttatttggcagtgtcttcagcagcctcaccgattgcaacataatcgtccggaacttcgatgcccagctcttcgcagatatctttgttatattcttttgtgaagtttggtgcatattcgatcggcattgtggaaatatcttcaccgtcctttaaaatcttaacagccatcttaccggttgtaacaccaaggtcataatagctgatggaaagtgtcgcaacaccgcatccgctgcagataccttcttcgcctgtgattaccggaacttttgccggaaggcagatgttgttgatgatctctgtgttggaagcaactgtattatctgtcggtacataaattacatcacttgcgtcagttgctgttgtagcaacagaagagagatcattagagtcagagaatgcataatattcacatgtatatccgagtttttcaagttcagcttttactgtatctacctgatactgagagtttgcttcggcagaacagtagagaagacctacattttttgcatccgggaaaagttcattgagcattgctgcctgttgatcaaggggagcaaggtctgcagttccggaaatatttccgcccacagtcccgttgaaatcatccagtccaagtgcaacaccgtattcagtaacagaagtaccaagaatcggaatatcgcttgtccctgctgcagctgcctgaagagcaggagttgcatttgcaagaatcaggtcaacattattggaaacgaagctgttaatgattgtagaacaggtgttggaatctccctgtgcgttctgctcgtcaaaggtaactgcatcttctcccagttctttggtgacttcatccttgaatccctgtgtcgcagcgtcgagagcttcgtgctgcacaagctgacagataccgattgtatatttgtctccgtcagcagcacttgctgttactgcgcaggttcccatagccatggctgctgcaagagtgattgctaatgcttttcttttcataatgatatatcctcctaatataatgtttaaattaagtcaggtaagaattgcgtttattatttgataatataaaacttacctgaatccgaatgattttctgtagggaaagcagtactggtaaatgattcggataatgtcatcgagttattcgactgtgacgttttaaagtataacgctttagtgtaaaaaagtcaagcgacctgcacaattatatttttaattcatatagtataaagagtatatgaagaaagcagagtgtcgtcatggcatattcgatcatgctggatgccggacatggaggtcaggatccgggagccgtatataagggaagacaggaaaagaatgacaatcttaaacttgctcttgcggtaggtgagattttaaaaaataaagggattgacatctcttatacccgtaccggtgatgtctatcagacaccttttgagaaggcacagcttgcaaatcaggcaggagtagattactttatttcatttcatcgaaacagcagcccaaaggaaaatcagtataatggagcggaagttttgatttatgataaaagcgggattaaatatcagatggctgagaatattctgggagctctgggagaagtgggattccgcgaaatcggtgtaaaagagcggccgggacttgtggtcctcagacgaaccaggatgccggctcttttaatagaaaccggatttatcaattccgaagaagataataaactgtttgataacaagtttagcgatatagctcagggaattgcagatgcgattcttggaagcctggatgaggaaacagtgcaggaaccgctttattacagagtgcagactggagcgttcagaaaaaaagagaatgcggaccgtatgttatatcagttactggaaaaaggttatccctcttttatgttacatgaaaacggattgtataaagttcagacaggtgcctatcagcagattggtaatgcagtaaatatggagcagagactgagggatgatggttacagtacggttattgtgacaaaatagccttctggaaatattggaagtctgtgcatcgcgaagcgtgttgctgtgaacagagtgaacagtaacataagcagtgggggacatagttttaagaattaacttggttgtacgttaatagaaaaaatatggtacactgtatctatctatagaaatcttcgtaaataatgcatattgttccggttcatcagagcgtgaatttttgttggactgttacaaacgcattatttgagaggtgctgtagaaaaaacagataacgaggagttagtaatgatgaatgacgtatatgaaaaatttttaaaaagttcagaagagtttatttttgcagaaaacaagccggaaaaatctgatattatttttgtccctggaaatggttatccgcagatggcggaaaaagcagcagaattgtttaagaaagggatggcggactggattctgcccagtggaaaatacagtgtagtaaatggaaagttttcaggcgttcttgaaaaaagcaatgtatatgataaggaatatggaacagaatgggaatttctcagggatgttcttataaaaaacggagttccggatcagaaaatcctgaaagaagaccaggcaacctttacttatgagaacgcaatttattccagacaggtgacagatcatgcagaactggaaatagaaagagcgattttgtgctgcaaatcttaccatgcaagaagatgtctgatgtattatcagctcttgtatccgaaaacagaattttatgtggtgcctgtgaatgcagatggaattaccagagaaaactggaaaaagaacgaagaaggaattgatgcggttacaggagaactctccagaatcgtgaaacaattttcactgatgctggagagatgacagttacggctgttcttctgtttcagttttcttctcgggaagccagatgtggacaagttcgattctgtttttgtccagacggtcaacaaccaggcggatgccactttcaagtgtgacagactgaccctctttgggaaggcagtcaagctgttcaataatatatccgccaatagaatcataatcttcagattccagattaatatggagggcttcgttgatatcatccagcttggcagaaccctgaacaacatattctctttcaggctggatttctttaatatcttcgacttcatcctcatcgtattcgtcgcgaatctcacctacgatctcttccaacaggtcttccaatgtgaccagacccgctgtggcaccgtattcgtccagaacgattgccagattgacggatgctttacgcatttcaatcatcaggtctgctgtagctttgtattcataggtaaaataaggctcacgcaggatgttgcggattgaaaaaggtttgtcctttggataaacaagaagatctttcatattgataataccgattacgttatcagtgttgtcctcataaaccggaaaacgggtatgcatatcttcactgaagaccgccataagttcatcataggaaaaattgatatctataaaggtcatgtcgattctgggaatcatgacatcttttgcagttgaatcgccaaaatcaaacacattgtagatcatctgtttttcttcgttttcaatgacgccgtctttttcacctacattgacgagggtacgcagttcatgttcagtcatggcatttgccttttcgtccgggttaacatgcagaatgaccagtacaccttctgttattttatttacaatgaaaacaacgggagtaaggagaatcataagcccgtatattattcttgaataggccagggacaatttttcagcatgaattgttgccaggtttttgggggttatctcaccgaaaatgagaatcagcagagtcaggatgccggttgtgattcctacatatgcgtttcccagaatctttatggtgagtgtagtcatgagagaagaaacagacatatttacaatgttgtttccgattaatacggtactgagcatctttggggaattggaaattattttttccagaataacagcacgtttgttgccctgctcggcaagagactgtatccgaatcttatttacggttgtcatagcggtttccgcagaagaaaaaaatgaagaaagtgcgatcagtatcagaatcgccaccgcctgaaaggcaatacttgaatccaagatttattcactccttttgattatctttattgattgaatcatatcataaaacatttaagcaaaatatacatgatttcatataaaaaatcaagaaaaagcttttggttcaaagatagtataaaaaaatttaaaagaggactgtcgaaaaagtaagatttgtgttataattcactcgattaaaatgaaaaaaaacattacagaatatttacaaaatgataaaagtttgataatatacagatatgtaatattattgtattacgtaaaaagagaactgatatttggctgaaagtaaaaaaatgattatcaggaaacataagaatcgaatataaatatagaggtgcgatatgtccaataatataagaataagaaaaaataaattaaaaggaacgggtattttggcggcagcggctttaacagcggctttgattgcaggaaataatataccgggtgtaacaagacaggtcagtgcggctgagtcacaggagaatactgtgtcttctctgatcccggacaacatcacgcttgataagcctgtagaacttgcggatgtagaacttccggcaacggaatatggaacttttgaatgggcagatggaagtttcgttcctgcacagcgtgtacagagctgtgaggtacttcttataccggcagaagggcaggatttaagccatgtggatggatgggatccggagagcggcgcggttgtcggttacatcaatgtaatagtgaatagtattacggatggtgataatgttgataagacagaaggctcaggtaaaacagatccaacagaaaatgcagattcaacagaaacgcctgaaacttcgtcagaaaaacctgccgcagatgaaaacgctgatacagacaataaagaagataaggaaagtaaatcagatcaggataataaaactgatacagacaatgaagagaataagattgaagaagataaaacagataataaaaacaacaaagataataacagcaatgcagataagacggataaagatacagaaactaccggtaagctggaacctgcagatgatatgacacaggataaagaagatacgaagaaagatgatgaagatggcgcagatgataatatctttgataatcctgttctgccggacgataaggatgaccgtcctacagatgcagaggattctctttctgatgaagaaaaagaagagagggccgcacttaatcatacctgcgacggtattacagtaagcggagttaatcttccatggtatgtacagttcagagtttcaagcggtgacagctatcagtttaccaatgaatcagatgcaatgattttccagtcttatgaatttgaactctgggatcttaagaataatacagaatatgagatccctaatggagattatatcagtgtcactgtgccggtaaaatccggatatcagtatactatcgaacatctcctggataacggggcaactgagacgattattccgagtgtagagaatggtattatggtattcagcacacattctttcagtccatttggaattgcaggaagcagacaattagtaggacctgatgcggggaatgatacggacgatacagatgcggtaactcctgcaccggcttcctccgacagtcagagctctgattccggaaagaacaatacagtatctatgaatgacagttctgacagcaataatggttcttcttctgatcagaatgataattcaacggaaaataaagctgtgaaaaataacaatacagtaaataccggagatacaacatcaattatgccgtttgtgatactgtttgtggcagctgcagtgatcgccggtgtggctgtatttataaaaaagagaaagaaataaaagaataacactgattcctcccccatatagtttaacaggaggggaaacaatgaaagtcagagcaattttgaaatcactattatttgcatatgcattaacaggagtggcattactgcttttggccctggtactgtttgcttttgatctgggagaaacagctgtagatgcggggattattataatttatgtacttgcatgtttcatgggaggctttatggccggcaaaattgtgtgtaaagacaaatatctgtggggtgttatcacaggcctggcttactatgtattactgttgactgtctctgttatggcaaaaggcggctgggatatgagtgcagctcatgcagttacaacattttttatgtgcacaggcggtggaacactgggtggaatgctgtcgtaaaaaaaagcttttaaaatgaaaagatatatgatatactatgccaagaatataattacataaggaggatagagttatggaacatatcaaaaccctgaatacaaagaatttacagaacactgtaaaaaaaggtggatgtggcgagtgccagacttcctgccagtccgcatgtaaaacttcctgtacagtaggaaaccagagctgcgagcagaaataagatcagctatggagaaatgagataagcagcggaacttttattccgctgcttatcttacgcttagaaaggattttagtaaaatgagtctgattcaccgttataaaagcaatggctttaatattgtactggatatcaacagtggatgcatccatctggtagatgaggttacatatgaggtccttccatatctggaagagggccttggcacagaagctattgcagagaaactggaaaacaaatataacagagaagatattgagacatctgtaagagaatgtaataagctgaaagaagatggaatgctttttacaaaagatgtttatgagaatgtaattgaagaattttcaaataaccggcagaccgttgtaaaagcattgtgcctgcacattgctcatgactgcaatctggcctgccgttattgttttgccgaagaaggcgaatatcatggcagaagagctcttatgtcttatgaagtcggcaaaaaagctcttgatttcctgatcgcgaactccggttccaggaaaaacctggaagtagatttctttggcggcgagccgctgatgaactggcaggttgtaaaagatctggtaaaatatggcagaaagcaggaaaagcttcacaataagaaattccgtttcactttaacaacaaacggagttcttctgaatgatgaagtaatggaattctgcaataaagagatgggcaacgttgtactgagtgtggacggacgtaaggaagtacatgattacatgcgtccattcagaaaaggtgcaggaagctatgacctgatcatgccgaagttccagaagtttgcagaatccagaaatcaggacaagtattatgtaagaggtacttttacccaccataatcttgatttctccaaggatgtgcttcatctggcagatcttggattcaaacagatttctgtagagcctgtagttgcggctgatacggaggaatatgcgatccgcgaggaggatatcccccagatcatggaagagtatgatactcttgcaaaagaaatgattaaaagagagaaagagggaaaaggatttaacttcttccattttatgatcgaccttacaggtggcccttgtgtatacaagagactgtcaggctgcggttcaggaacagagtacctggctgtaacaccctggggtgatttttacccatgtcaccagtttgttggtgaagaacagtatctcatgggaaatgtagacgaaggcatcacaaagccggaaatccagaaggaattcggcggatgcaacgtttacacaaagaaagactgcaaagactgcttcgcacgtttctactgtagtggcggatgtgcggcaaatgcattccatttccagggagatatcaaaggcaattatgaaatcggatgcgaactccagagaaaacgtgtggagtgcgccatcatgataaaagccgcactggcatgtgattagtgggcagtaatctgtctgactgataccgccgtcggctgttatcataacagaaaatggctggcaggcggatgaacatgaccgcggacaaaaaatcaagaagggaaaagaactatgaagaaaagtaaaggaatcgtagtgctgcttctgacactgatcctgactgtgttcttttgctttactgcagccgtaggtatcggtcctaccggaaccggtgcagcaaaacatatcaacacgggtcttgatcttgccggtggtgtcagcattacctaccaggctaaggaaagcaatccgacaagcgaagagatgtcagatacgatctacaagcttcagaagcgtgtagagcagtacagtactgaggctcaggtataccaggaaggatcagaccgtattacagttgaaattcctggtgttacagatgcagatactattctgaatgatctgggtaaaccaggttccctgtatttcatcacaaaagaagatgctgacggaaaccagaactttactacaggacaggatggatatgttctttccagaactatggatgagatcaaggaatccggaagtgttgttctggaaggttctgatgtagcagatgcccagggtggtgcgatccagaatcagaacacaagtgcaaaggaatatgtggtaagtcttactcttacttctgatggagaaaacagtggtaaaacaaaatttgcagaagctacaaagaataatgtaggcaagcagatcgctatcgtctatgacaataacattatcagtgctccgaatgtaaatgaagagatttccggcggaaaagcacagatcagcggaatgtctgacctggaagaagcacagaaccttgcttcttatatccgtatcggttctctgggactggaactggaagaacttcgttccagtgttgtagctgcacagcttggtgaagaagcaatctctacaagtgttcttgcaggtgcgatcggtctgattatcgttattatctttatgatcattgcataccgcatacctggtgtagttgcaggtattgcactgattctttatacatcattaatgctgatcacgctgaatgcctttgatattactcttactcttccgggtattgcgggtattatccttggtatcggtatggcggtggatgccaatgttattatttatgcccgaatcagagaggaaattggtgcaggagtttcagtaaggaattctattaagtccggtttcagcaaagctttctctgcaatctttgatggaaatattacaacactgatcgcagcctttgtgctgatgtggcttggttcaggtactgttaagggatttgcttatacacttgcccttggtatcgtgatctccatgtttacagcactggttgtatccagactgattgtaaatgcactttatgcagttggtgtacgtgatccgaaattctacggatctgcaaaagaacgtaaggcagttgatttccttggaaagaagaaagtattttttgctatttccattatcctgatcctctgcggtccggcagcaatgtttgctaattcgcatgcaggaaacaaagcgttaaattacagccttgagttctcaggcggtacttctacaactgttacatttaacgaagatatggatattaagaccattgattctgaagtaactcctgttgtagaagaggtgacaggagataaaaatgttcagcctacaaaggtagtcggaacaaatcaggttgtgatcaagacacgttctctgaatcagagcgaacgtgaagctctgcagagtgcactggttgagaaatttggtgtagatgacagcacgatttccacagaaagtatttcttctacagtaagtagtgaaatgcgtcgtgatgcgatcgtagccgttatagtagctacaatctgtatgcttctttatatctggttcagatttaaagacatccgttttgcaagcagtgcggtattggcgcttctgcatgatgttctggttgtacttgcattctatgctattgccagagtatccgtcggtaatacatttattgcctgcatgcttacgatcgtaggttattctatcaatgctacaatcgttatttttgaccgtatacgtgagaaccttcacagtggttccagagaaaaactggcagaaattgtaaacacaagtatcacccagactcttacaagaagtatttatacctcttttacaacttttgttatggtagctgttctttatatcatgggtgtttcttctattcgtgaatttgcagcacctctgatggttggtgttcttgtcggtgcatattcttctgtatgtattacaggtgcgttgtggtatgtgatgaaaaagaaatttgcaggaaaaggacagccggcaattgctgcagcttccgcatctgcaaagtcctcttcaaagccgaagaaagcacgtgatgtatcacagaaagatccgactcagccaaagaagaaaaacagaaaaagagtagctgaacgtctggctgccgaagaagcagctaaaaaacagcggaatgatgatgctgaataaaacaataattgtctgaaaaacaggcagacagaaatatcccggggtaaaactccgggatatttttatgaggagagaaaatatatggagaaatgggtaatagcagcaaaaagagcagattttaaccagatcggtcaacagtttcatattgatccggtgattgcgagactgatcaggaacagagatgtgatcggagaagataagataagagagtatctgtcaggaacagtacaagagcttccttctccctggctgatgaaggatatggaaaaagctgtagatatcctggagaaaaaaatatcgcagaaagcaaaagtccgtattattggtgattatgatattgatggtgtgacctctacatacattttaatgaaaggccttgcgaggatcggagcagatgtggatacttatatcccggacagagttgcagacggatatgggattcatgcacatcttatagaaagagcggaaacggaccggatcgatacgatcgtgacctgtgataatggaattgctgcggctgctgaaatccagatggcaaaggataagggaatgacagtgattattacagatcatcatgaggttccttacagggaggaaaagggagaacgccagatggtgcttcctccggcagatgcgattttgaatccgaaacaatatgattgtccatacccgaataaaaacctgtgtggggcagtggtggcctttaaatatattgcagcactttacgagagatttggtgttccggcagaggagctggaagattattatgaactggcggctattgcaacagtaggagatgttatggatcttcagggagagaacaggattctggtaaaagaagggctgtgccgtctgaaaaataccaaaaatcaaggattgcaggaactgatccgagcaaattctctggaagatgctaaaatcacagcttatcatatcggatttgtgctgggaccatgtatcaatgccagtggcagactggatacagctgcccgttctcttgcacttctcaatgcaaaaacaaaggaagaagcagcaaggcttgccggagatcttacagctcttaatcagagccgaaaagctctcactgagaaaggaaaagaagaggcaatccggattatagagactacagagctgaaaaatgacagagtactggtagtttatcttccggattgtcatgaaagtcttgccggtattatagcaggcaggatcagggaaaaatatcacaggccggcctttgtattgacgggcggtgagacaagtgcaaaaggaagcggaagatcaatagaaagttactctatgtatgaagaactggtaaaatgtgcagacctgatgatacagtttggaggtcatccgatggcagcaggtctgtctatagaagaaaaaaatatagaagaattccggagacgcctcaatgtcaactgtacgttgacggacgaagaattgcgtcctaagatcgtgattgatgtgccgatgcctgtgtcttatattacaaaagaactggtagaacagatttcgcttctggaaccctttggaaaagggaatacaaaaccggtctttgcgcagaaaaatctcagagtgcttgatcacagtattatcgggaaaaataaaaatgtagtaaaactaaaacttctcgatccgcaggggatttcagtggaaggcatttatttcggagaagcagaggattttgtgaactttatcagggaaaaagacagtatttctgttacttattatccggagatcaacagattcaggggacgagagagtcttcagattattattcagaattactgttaatattaccgcttggtttgtaaccgccggtaagcctggaaatacaaatgtcagggcttaacagtaacttgattctgaaataaaaaggtgatatactataaaatatttatgagcgaacagcaatataacacacactggaggagaaataaaatgaagaaaattgaagattatgtattaagtataccggattttcctgaaccggggattattttcagagatattacaagtgttctgcaggacgcggatggcctgcagttggcaatcgactccatgcaggactgtcttaaggatatagatgtggacgtgattgcaggaacagagtccagaggctttatctttggtgtaccgatcgcatataatcttcataaaccatttgtaccgattcgtaaaaaaggtaaacttccccgcgaaacagtatctgtaagctatgatctggaatatggcagtgcagagattgaaatgcataaagattccataaaaccaggtcagaaagtggttatcgttgatgatctgatcgcaacaggcggtacgatcgaagcagcgatcaagctggtggaacagcttggcggtgaggttgtcaaggttgtatttctcatggaacttgcaggtttaaagggacgcgaaagactgaatgggtatgatgtagcgtctgtaatttgttatgatggtaaataagcacagctgattgtgcaggacaggcaggtgggagcatatgacagagataacaaaaagtacagaagcaaaaaaagatgaaatgcaggttgaaaaagagaagctggaatctgtaaagagagcagatgcggcagtaaagaccatgcatgattttacaagtccggaggtgctttataaagaactgataaacagtgttctgaagtatcatccatcaacagatatttccatgatagagaaggcatataaggttgcaagtgaagctcatgaaggacagaagagaaagtctggagagccatatatcattcatcctttgtgtgttgccatcattctggcagatctggaacttgacaaagaaacgatagttgcaggtcttcttcatgatgcagttgaagatacctggatgacctatgaggaagttgagaaggaatttggttcagaggttgcacttcttgtggatggtgttaccaagctgggacagttatcttattctgcggataaagtagaagttcaggcagagaacctcagaaagatgtttcttgccatggctaaggatatcagagttattctgatcaagcttgcagaccgtcttcataatatgcgtaccttacagtatatgcgtcctgaaaagcagcaggaaaaggccagagagaccatggatatttatgctcctattgccatgcgtctgggtatttccaagataaaggtagagctggatgacctgtcgctgaaataccttaagccggatgtatattatgacctggtgcataaggttgccctgcgtaaaagcgagagagaacagtttgtaggtgcgattgtaaaagaagttaagaaacatatggatgatgccaatattaaggcgcaggtggacggacgtgtaaaacactttttcagcatctacaagaagatggtaaatcaggataagactattgatcagatttatgatttatttgctgtccgtattcttgtagatacagtgaaggattgttatgctgcccttggtgtgatccatgagatgtataagccgattccgggacggtttaaagattatattgccatgccgaaacccaatatgtatcagtcattgcataccacattgatcggacctaacggacagccctttgaaatccagatccgtacttatgaaatgcacagaactgcagaatatggtattgctgcacactggaaatataaagagtcgtctgacggaaaggttcctgtaggtaagagtgaggaagagaaactgaactggctgcgtcagattctggaatggcagagagacatgtctgataacaaagaattcatgagtcttctgaagaatgacctggatctttttgcggacagtgtttactgtttcactccacagggagatgttaaaacacttccaagcggttctacaccggtggattttgcgtacagtgttcacagtgcagtcggaaataagatggtaggtgccagagttaacggtaagctggttccgattgaatatgagatcaaaaacggcgaccgtattgaaatcattacttcacagaattctcagggaccaagccgcgactggctgaaactggttaagagtactcaggcaaagaacaagattaaccagtggttcaagaaggaattaaaagaagataatatccttaagggcaaggagatgcttgcgcagtatgcgcgtgcaaagggatttaagattgcaaattatacaaaaccccagtatctggaggctgttttgcgtaaatatggtttcagggactgggattcagtacttgctgcaattggtcatggcggattgaaagaaggtcaggttttcaataagctggtggaggcatatgataaggaaaataagaagaatctgacagacgagcaggttcttgaggctgcttctgagacacaggaaaagcttcacattgccaagagtaagagcggcattgtggtaaaaggaatccatgatgtggcagtccgtttttccaagtgctgtaatccaatcccgggtgatgagattgtaggttttgttacaagaggacgtgggatcacaattcatcgtacagattgtgtcaatgtgctgaatatgtctgagacagacaggacacgactgattgaggcagagtggcagcagcctgataccaaggaaaaagagaagtatacggctgagattcaggtttatgcaaataaccgtacagggcttcttgtggatctttctaaaatatttacagaacgtaagatcgacctgcgaagtatcaacagccgtacaagcaagcaggagaaggcaactatttccatgagttttgagattggaagcaaagaggaactgcgttccctgatcgagaagatccgtcaggtagagagtgtcattgacgtagagagaactacaggctgatcatggaaaaatctgctggaacattattttatggaactgctgcagattgacagaaaggaataacatgaagaatttagaattacagaaatgtatattaggacctgtatatacaaattgctatctccttaagaataaagaaaccggagaactgatcattgttgatcccgcagattgtccggagaagattgaaatgaagatttcccggatgaatggaaaaccggtggcgattcttcttacccatggacattttgaccacattctggctgcacaggcagtaaaggagaaatataatattccgatttatgcctgtcgtcaggaagaggagatgctccgcgaaccttcgatcaatatgactgtacattatggacagggatgttctattgtgccggatgtatttctggaggatctggatgttatcagactggcgggattttccgttcagatgatccatacaccgggacataccaaaggaagctgctgttattatctgaaagatgaaggtgtattgttcagcggtgatacagtgttctatggctctgttggaagaacggattttccgggtggaagtacagcagaaatcgtgagaagtctccataaactggtagattcgcttcctgaagagaccgaggttttccccggacatgatgcatctaccactattggttatgaaaagaggtataatccatttgtgtaaaataggcattctgtttgagaacagagattttgaacatgatgtttatgaactgatcaaagcgttttatcccgaagcggagatacatactctttatgaaaatgctgaagcagagtatgacctccgcttcagtgtggaacaggataatgacagttatatcataaaatacgaaaggacagagaatctgtcgaaacaggaaacagagcaaaaaggggtaatttccgcagacatactttctaaagagaatgcaggctgtggaatacaggatgctcatgctctgagaaaagagaataaagataatatcaaatatgctctgtatcagttgttggtaaaactgacgggcagaactcttccatggggaaatctgacaggaatacgtcctgccaaactggcaatgggaatgatcgaatccggaatgaaaaatacggaagcagcccgggagatgcgtgagagatatctggtaagtccgcagaaaacagcgcttgccatcactattgcaaacagggaaagagagattctgaaggatattgactatgaaaatggatacagcctttatattggaatcccgttttgcccaagtatctgtctgtattgttccttcagctcctatccgctgaaagtgtgggagaagagaacagatgaatatgtggaagctctctgccgggaggtaagagagactgctcttatgatgaagggaagaaaactggacaccatctatattggcggcggtaccccgactacactgcttccacatcagatccgtaagctcctggatacagtgggagaagcttttggctatgaaggactggcagagtttactgtggaagccggcagaccggacagtattacacgtgaaaagctgatggcgatcagggagtatccggtaacaagaatttccgtaaatccacagactatgaatcaggaaaccctggatattatcggtcgcagacatactgtggagcagacaaaagaagcgtttcatctggcacgagagctgggatacgataacattaacatggatctgatcgtaggtcttccgggtgaggatattcacatggtagagcggactcttgaacaggttcgtgaactggcaccggacagtattaccgtacattcactggcagtgaaacgtgcagcaaggctgaatatttttaaagagaaatatcaggaaatgtcttttgagaataatcaggaaattatggatctgaccatgaaaactgcgtatgaaatgggaatgggtccttattatctgtacagacagaagaatatgaagggaaattttgaaaatgttggctatgcaaaggttgacaaagcgggaatttacaatatactgattatggaggaaaaacagcctatcatcgcactgggggcaggcggttcttccaagctggtctttgaccatggacagagaattgaacgtgtggagaatgtaaaagacgtttctaattatatttcccgcattgatgagatgatcgagagaaaacggacagcaatagctacctggctgtaggatgtggaggtaacattttggacacagtacaaaagacagcggcaggttcacagcagaggatcctggaatttgaccttgcttctgaactgcatcatggaatgctggtaagtaatctggcttatgcggttgcagaggagatgggactgccgcatgaacagtgctatgagcttgcaatagcaggaatgctccatgatataggaaagctgaagctgacaagttatattaacggacaggagcaggatcctctggtgatcgaggaactgaagtatgtccggatgcattctacattgggatatgaggaacttaaagggcagggatattcggattttgtattggagagtatcctgtaccatcatgagaattatgatggcagtggatatccgtccaataaagcaggtgatgacatacccataggtgcccggatactcagagtctgcgatgtatatgcagcattgatctctgacagaccatacagaagaggatttgatatttcttcagttatggagttgatgatcgatgaagtaaaaaattttgatatgcaggtttttcttgcgtttcagagagtggttcataatggagacgggcagaatttttataaaagaggaggacaacatggcattaaagaagaaaccggtaaccggtatgaaggacattttaccaaaagagatggaaatccgtaattatgtgatgaacatgattcgtgaaacatacggaacatttggcttttcatctatagagacaccatgtgtggagcatattgaaaatctttccagtaaacagggcggagagaatgagaaacttattttcaagatcctgaaacgtggggagaaactgaaacttgcggaagcagagaaagaaagtgatctggttgactccggacttcgctacgatctgactgtgccgctttccagatattattccaacaacgcaaatgagcttccggctccttttaaggcacttcagatgggcaatgtgtggagagcagacagaccgcagagaggacgtttccgtcagtttatgcagtgtgatattgatattctgggtgagtctacttatctggctgagatcgaactggttcttgctaccacaacgttgctcggaaagctggatttccataactttacgattcgcatcaacgacagaaaaatcttaaaagcgatggcgcagtacagtggattcccacaggaaagctttgacactgtgtttatcattctggacaagatggacaagattggtttggaaggtgttgcagaagaactggagaaggaaggatttgcaaaagagagcattgatacctaccttggacttttcaaagagatcacttctgacattgagggtgttcgttactgcaaagagaaattaaaagatgttctggatccaaaggttgctgaggaccttgaaacaatcatttctactgtagattctgttaagacagcagattttaagatgtctttcgatccgactttggtacgtggaatgtcttattatacaggaccgatttttgaaatctctatggatgagtttggcggcagcgtaggcggcggtggacgctatgatgagatgatcggtaaatttacaggaaacaatacatctgcctgcggattttcaattggattcgagagaatcgtaatgcttcttcttgagagaaattatgaaatcccgacaaagaatggtaagaaagcatatcttatcgagaagaatatgccggcagacaagatgctgacgattctgaaacaggctcaggaagagcgtaatgccggaacacagatcaatatttctattatgaagaagaataagaaattccagaaagatcagatgacagcagagggctatacagagtttgtagaattctttaaagacagaatgtaataattcgtaactgttcagcaacattgcgagatagcagactgccggatagttacaacaattcttataatatagaaagcatgaaaagaggaaagaaacatggctgaaagtatgcagggactgcacagaacatgccgatgtgcagaagtaacaaaggaaatgatcggcaaagaagttgtccttatgggatgggttcagaaagcccgcgataaaggcggaattattttcgtagatttaagagaccgttccggtatcatgcagctgatttttgagaatggcagcattgatgaagaaggttttgcaaaagcaggtaagctgagaagtgaattcgtaatcgctgttaccggtgtggtagaagaaagaggcggcgctgttaacaagaatcttgcaacaggtgaaattgagcttcgcgtaaaatcccttcgtgttctgtctgaagcagaggtacctccgttcccaattgaagagaacagcaagacaaaagatgaaatccgcctgaaatatcgttatcttgacttaagaagacctgaccttcagaagaatattatgcttaagagcaaagtcatgatgcttacaagacagttcttcgcaaaagaaggattccttgaaattgaaactccgatgcttggtaagagtacaccggaaggtgcaagagattatctggtaccgtctcgtgttcatccgggacatttctatggtctgccacagtctccgcagctgtacaaacagcttctgatgtgctctggttatgaccgttatatccagattgcaagatgtttccgtgacgaagaccttcgtgcggacagacagccggaatttacccagatcgatatggaactctcttttgtagatgttgatgacgtaattgatgtaaatgagagattccttgcttatctgttcaaggaagtacttgatattgatgtaaaacttccaatccagcgtatcacatggcaggaagctatggacagatttggttctgataaaccggatatgcgtttcggaatggaacttcatgatgtaagtgatgtagttaaaaactgtggattcagcgtgtttacttctgcgttggaaaatggcggcagtgttcgtggtatcaatgcagaaggacagggcgctatgccacgtaagaaaattgacaaactggttgagtttgccaaaggttatggtgcaaaaggccttgcatacattgcaatcgctgaagatggcacaagaaaatcttcttttgctaaattcatgacagatgaagagatggatgctctggtagcagctatggatggtaaagcaggagacttacttctgtttgcagcagataagaagaaactggtttatgatgtacttggcgcacttcgtctggaacttgcaaagcagatggatcttcttgataagaatgagtatcgtttcgtatgggtaacagagttcccgcttcttgaatggagtgaagaagagaatcgtttcacagcaatgcatcatccatttaccatgcttatggaagaggaccttccacttctggatacagatcctggaaaagttcgtgcaaaagcatatgatatcgtattaaacggtaatgaaattggtggaggaagtgtcagaatccatcaggatgatattcaggagagaatgtttgaagcacttggattcacaaaagaagctgctcacgagcagtttggattccttctggacgcattcaaatatggagttccgcctcatgccggactggcatacggacttgaccgtctggtaatgcttatggcgaaagttgacagcatccgtgacgtaatcgcattcccgaaggttaaagatgcttcctgtctgatgactcagtctccgagccgcgtaagcgaggagcagttaaaagaactggaactggaagtaagaccggaggaagtaactgaataaggatggagcttacaattcagacgtttttgattgtatgcccgttggtattccttgcaggattagttgattctatcgcaggcgggggtggtttgatctccctgcctgcgtatttgcttgcaggggttccgatgcacaatgcgatagcaacgaataaattatcctcggcaactgggacagcgatttcaacagcacgtttatgtaagaataaatttgtagactggggagttgcactgccatgtatttccatggctcttgtcggttcttttgcaggcgctcatattgcgcttcttgccagtgataagatattaaaatggatgctgattccagtacttcctattgttgcgttttatgtaatgaagaagaaaaatctggatgataacagcaatgtagagatttccagaaagaaacagtggattttgtgtgcggtgtgttctctggctgttggctgctacgatggcttttatgggccgggaactggtacgtttctgcttattttatatacaggagtagcaaaacttcccgtagcgaaagcttccggaactatgaaacttgcaaatctttcttctaatataatggcattagttgtttttttatttagtggaaagattgtcatatatcttggacttgcagcttctgttttttccattgcagggcattatgtaggatctggaatggtaatgaaaaatggaaataaaatcgtaagaccgattattctgatcgttctggttttactgtttatcaaaattataacggggatgtaaaaagaataagacaaagattaaaaagaccaccatatcatagaatgattcgggaaaggaacatttctgtgatatggtggcctttttagttgtttaaccaaactgcgaagcagttatttggttatgagcaagtagcggaagcggattgcgaatatccgattgactaatcgttaattggaactgctttcagtagaagtattatcatctgtctgcttatctgtatcggcagaaatattttcatcctcagaatcagaagtctcgagaggagaatctgtcaaagtaccgaaaatagcatttcccaaagtatttccctcatcctgaagtttccaggataccccatcattgattagaacaaaatctacatcattgacggtagtaacggtattatcattgatgctgttcagaagaatttcgaaagatttctcgtatcgtttctgggagccatcgataactgcgtcagcagaagccagatatttatcaagcttttcctgataatcagccaggatcgaatcactgtcaaaggttgtaatttcagttgtaacagtggcattgtatccattttcactgctggatttaatgacataattaaaatttttatgaatctgttcggcaagtgctgaggcaatggaattttttgcagtatcggatgtattcatgatatttactacacccagataagatgtcatttctttcaaatccagtttctgtagagtgtcaagatagacggtcagggtatcttccggtgaaaggatatccggatctgccagatcagctataagaccgccgacaaggtcatcttccagagaattggtacgctggatcttccatttttcctttttatcattgcctgtattgacaagctgtatgttacagtctgtctcagctgtatcatagtcatttgtgtttaaaagatgattcaggatcagataatgagcctcaagagatctggaagaatctttgatatttcctttttgtgcctgggctgactctgtgatctgtgtccggagaagttctgctttaaaatctctggcaagaactttggaatcgattgtggtcagtttgacagaaacagtggcagaatgattggttgtgccgacgatgacatccgaaattttgtaattaaatttccggaaaaagagagaaaaggttttattgatttcatcagttaaatcagtattctctgtggcatcggggaacagctctgtatagggtatgtatttttgcgtagtttctgaatcgagattttttaactgatccagttcatttctgactacactctttacatctgactcatttttgcggaaacagccgctgcttacagatacagcaaaaagaaaaaataagacagagaaaagaagaatcaggtgtttgtttatattcatacgtgttctttcctttcacagtgctttctgtgcaactgtttgacagttacttttctgtttattttaacagattttgtactgactgtcaaaaaagtgaaaaaggtgaacgaaattcataagaaaaacgtgaaaaaattgtgaaaaatgttgccacttgattacaaagcttttattttaaggcagaatctgctatgataggaaagtgaataataatgatataaaaaagcagtagtgtataatagatgttagcctgaacaaggtgacaatatcaaggaggcaatttatgaagaaacgtattattatcgttttgggaatcctgattgcagcaggtggtatcggaaccggagtctggtatcactttaaaggaaacggtcagagtggaaccggtgattctattgtgtatgtgtcaaaagtaagtgtgatcaccggatctgaaacaacagcggtaaatcggtttgccggtgtggtagaaccgcagaaaactgtaaacgtaaaaatagaaagtggacgaaaagtaaaagaagtggaagttaagaccggagaagaggtaaaggccggacagcttctttttgaatatgatctcagcagtattgaggatgatctgaagcaggcgcaactggatctggatagattaaaaaatgaacagatcagcctgacagaacagatagctacgctggaagcggagaagaaaaaagcaaaggccgaagatcagttgtcctataccattgaaatcgagactaacaaaatgaatctcaagaagaatgaatatagtcagaagagtaaacagtctgaaattgataaacttcagagcgcaacacagaatacagaggttcgaagtgaaatagatggtgtgatacagaaaattgacacttccaaaatgacaagtgacgacggtgattctgtggatgacagcagtgcaatggacagtagcatgtcgtcaggtgacggaagttcggacagttctgcatttattacaattctcagtacaggtgcttacagagtaaaaggtaaagttaatgaacagaacagggattctattgtacccggagaggcagtgatcatccgttccagagtagacagcagtaaaacatggaaaggaacgatgggatccgtagatgtgaataatggaacttcagatgacagcagtaatgatatgtatatgggtatggcaagtaccagttccgatgatcagacaacgtctacttcttatcctttttatgtggaattggattcctctgagaatctgatgcttggacagcatgtgtacatagaacgtgacatcggacaggatgagaaaaaagatggtctgtggctcagtgattactatattctggacacagataccaatgaaccgtatgtatgggcagccagcgataagaacagactggagaagcgttatgtaacacttggagaacatgatgatgatcttggagaatataagattgttgagggccttacaaagaaagatgcgattgcattcccgacagcggctctggaagaaggcgaaaaaacagagatcggagatctggctcagacaatgagcggaggcgcggacgggattacagatatggatgctgatcatggaaatatggatgatgaacagccagattccgcagatggggaagcctatacagatccagatatggaagagggttctgaagatgacagttcggatgactcgattgatccaaatgaggaacttgtaccaatcgatgaggcacctggtatgagcgcaggtgaagacgtggaggggatcgaatgatactggaattaaagggtatatataaagaatatcagcagggtaaaatgaaggttccggtattaaaagatgtgaatttctccatggaagaaggagaatacgtggcaattatgggaccatccggttcgggaaaaactactctgatgaacattatcggatgtctggacaagcagacagaggggactttttttctggatggagtggatattaaggcgtgttcggagaatgaaatgtcagatatccggctgaataagatagggtttgtttttcagagttttcatcttctccctaagcagagtgctctggcaaatgttgagatgccattaaattatgcgagagtacctaagaaggagagaagagaacgcgctctgaaggcacttgacagagtgggcctggcggacagagtggattttaagccaaatcagctttcaggaggtcagatgcagagggttgccattgccagggcgatcgtcaataacccgaaacttcttcttgcagatgaacctacaggtgctcttgacagtaaatccggtgcgcaggttatggaacttttccagagactgaatgatgagggggtatctgtattgatgatcacccatgatgcggatattgccgcacatgcgaaaagggtggttacgatcaaagatggtatccttcaggaaaagaggtgatcttcatgggcaaagtaaagaaaatcctcgcaggagtgcttgtggtggtaatcgcaggaagcggaattacagcgggattgatgcagctgaagaaaaacagccagaaaacagtggcggttactcctgtgagcggattactgcaggaattttatacaccttccaccacgcttgacggaaccattacatccagtgcaacacagacagtaaacggtgataaagacctgattattgatcagatttatgtgacaaagggagatgccgtaaaaaaaggggatcctctggtttcttttgatactactctggtggaaatggaactgaatatagcaaagctgaaaaaacagaaactggagcaggatttaaataaagcagtgaacagattgaacagccttcagaatggtggacctgtagaggaaacagatgcgggtacagacgccgataacctgaattcaaaaacaggaaaaactgataatgatacaggcgatgatgatatgacaccggatgatacgttatcatccacagcagatatgtccggcagttacctggcaacagccatgtatccgtttttattatctgcttttacagatggagatgcagtggataatgcgggctcagacaattcttcatccaagtcagatttaccgggagatgatgcttcaacagataccggaaatacaggcggttcatcaggtggaacatctgcggataatgatattccggtatattcggatccctcagcgaatggattcagcgacggagagaaggatgattttaattcaggaaaaaatgatacaccggaattatcaccaacgccaacgccaacactggatgatcgtaccacatattttgatccttattaccgaaaaggtgatccgaatatcactgatggtgacgagccgttttatcagaaactggatgcagattctgttccgtttacaggaagtggcacagaggacgatccatatgtatatctgtgtagcagtgcaaaagaaaaagtaacagtaatgggttcattctttaataaacttgcaggatacagtcctgatggaaccaaagttgttaatcagggtggttactggtaccgtctggaatttcatcagaatgatacaatagcggactatgatgatctgaaaacctcctgcacaggttattatctggtaaacggaagtcttctggagaaaccggtatatgaatttgcagaggtggaattcacactggcagatgcagataaatatgatgagaatccggatgatggaggagatgataatcctggtgggaatgatgaacctaccggaactcctgtttccagagcagatgccatcaagtatcagaagagtaagattgccagccttaagctggatcttcaggaaagcgatatcaagatatcacagctggaaaagaaagcgaataaaaagcttatcactgcaaaactggatggtacggttacttatgtgggggattccggaagcggtgagacaactgacggtaaggctctgatcaagataaaaagcagtgatggtttttatgttgtaggttctgtgagtgaactgatgctcgatgattttaaagaaggcacaaagcttaactgtacaagttataccagcggatcttttgaggcagatgttatggatgtttcggaatatcctgtaaccggaaacagcttctatggaagcagtaatccaaatgtgtcttattatgcatttacagcagtggtaagtgacaagacacttcagttggaagatcaggactgggttactgtcaattatgaagcatctgctgcagagaacattatggtcattcagaaagcttttgtcagaaatgacaataataaaaactatgtgtataaagatgataatggtatcctgaagaaacaggagatttcagtgggtgcagctgtagacagcggttacagtgtgattgtcaaaggtgggctcagtgaagatgatctgatcgcatttccttatggaaaagatgtgaaagagggcgcaaagacaaaagaagttactctggatcagatgtatggatattaattgagaaaggagacattttatgcttgaaaatatacgcctggcttttcagggaatatggtcacatatgatgagatccttcctgaccatgctgggtatcattattggtattgcatctattattgcaattgtttctaccatcaagggaaccagtgaacagattaaggaagatctgataggtgcaggttccaatacggtaaagatttatctgtatgatggagataaccagtatgatgcggaatatggaaattcttcaaaaacaccgattttgacagatgatgtaaaagaagaagtaaaagatttggatcatgttgagaatgcgaccttttattataacagtaccagcgcatctatttataataacaataacagtctggagggtggaagtgtttacgggattgatgtgaactatctggctacctgcggatatataattcagtcaggacggggatttgtaaaagatgactacaaaaattacaataaagttgcgctgatcgatgataatgcggcacagaatctgttcccgtcacagaacccagtagggcagactgtggagatcaatcaggaaccatatacgattgtgggagtgatccggcaggatgagaattatcagccgacgatcaacagtattgacgaatactacacttattatcagtcgattgtaggaagtgtaatgattccggacagctgctggccgatttcctttaaatttgatgttcctcagaatgtaattgtgaaagcagacagcacagataccatgagttcggtgggaaatgcagcagcagatgtgctgaataatttaattgcagccttaaatacagacggaaatacaaccatgaaatacaaagccgataatattatggagcaggtcaagaatatgcagaaactcagtgagagtacgaataatcagctgatctggattgcaagtatttctcttcttgtaggcggtattggtgtcatgaatatcatgttggtttctgttacagagcgtaccaaagagattggattgaaaaaggctatcggggcacgtaagaagacgattctgggacagtttctgacagaggcttccgtacttaccagtattggcggtattatcggagtaataacaggaatcgggctgtcgaaagtggtgggaaaggttaccggttcgcctactgcgatcagtgtgccatcaattgtgatcgcagtattgttttctacagtgataggcgtggtatttggactgcttccttctgtgaaagcagcaaatttaaatcctattgatgcgttgagaagtgaataaacactgcacagataaaacagacttgatgtacaatacctttgtatattgagtctgtttttctgtaacatttttagttactgtttactggtaatatcttgcaaagcgtgttattgaaaacgaagtgaacaataaccatttttctgtggattttaaacagaaaaacaatcaaatttgtatagatgtcaagaaatgtgctaaaatttgtacaaaaaataaaaaaatatggaagtacaaatacaggttgtgctataatgaagtatctcaaaaagaattatttatacaggaggaagttcgcggatggtatcatttacctatatcatcaaagataaatttggaatacatgcaaggcccggactgcttcttgtgcaggaagccggaaagcttacgagcaatatcactatttttaaaggaacagacagtggtgatgcgaagcggatgttctgtgttatgaatcttgcagtaaaacagggagatcagataacagtacatgtggaaggcgagaatgaagaggcagatgccgaagtaatgagagagtttttgaaaaataatctgtaactgtgaagatgtcagacagttatgccataatctttaataaggagaattggagtaatgagagtattagaaggtaagtccgtattttcaggaatcgcaattggaaagatttctattttgcagaaagcagacacaagtgtaaagcgtacgaaggtagaaaatccggaggcagagattacacgtgtgcaggaagcaaaagagaaagcagttgaacagcttcagaaactgtatgataaggcactccgggaagtaggagaatcaggtgctgctatttttgaagtgcatcagatgatgttggatgatgaggactatctggattctattgataacattatccgtacggagaatgtaaatgcagagtatgcagtagcaacaacaggtgataattttgcagacatgtttgcgcagatggatgatgactacatgaaagcaagagcggcagatgtaaaggatatttcagatcgtctggtacgtgtattatcaggacacgatgagggagatatggatgctgcagaaccatctattatcgttgctgaggatctggctccaagtgaaactgtacagatggacaagagcaaagttcttgcatttgttacaaggaaaggttcttccaattcccatacagcaatccttgcaagaactatgaatatcccggcgctgatcaatattgaatatgatgacagcatggatggaaaaatggcagttgtagacggcaagaccggttctcttattgtggaaccggatgcagataccctgaagaaatatcaggatcagaaagacgaggagttgcgccagagagcaatgctcaaagaattaaaaggcaaaactacagagacaaagagtggacataagattcatctgtacgcaaacatcggaagcacaggcgatgtagccagtgtactggctaatgatgcagaaggtattggtcttttcagaagtgaattcatttatctggaaaaagataattatccaacagaggaagagcagttccagatttataaagcagtagcacagaatatggcaggaaagaaagtaatcatccgtacactggatatcggcgcagacaagcagattgattactttgatatggcacacgaggagaatccggcaatgggttatcgtgcaatccgtatctgcctggacagaccggaagtatttaagacacagcttcgtgcactgttcagagcaagtatgttcggaaatatctccattatgtatccgatgatcatctctgtaacagaagtaaaacagatcaaggctattgttgcagaggttaagaaagagctgacagagcagggcattccgtttaaagatgacgtagagcagggtgtaatgatcgagacaccggctgcagttatgatcagtgatcttcttgcaaaagaagttgatttcttcagcatcggaactaacgatttaacacagtatacactggcaatcgaccgtcagaatgcaaaactggataatatttatgattctcatcatgaagctgtacttcgtatgatccagatggtcattgataatgcacataaagagggaatctgggcaggaatctgcggagagctcggagcagatactacattgacagaacgctttatacagatggggattgatgaattatctgtatcacctacatttgttctgccggtacgtaagatcgtaagggaactggactgattctggcataaatatcgcaaaagaatagaaacaggcagtcaaaattccgcatgggtcaatctatgcgggatttttttgcgataaattagcggttcctgattgtgatacataaaaaaatatgataaactgaacatagtctgtaattttatgaaaagataattgatacataaaaaatctgaagtggatcagaagcaaaggagatatgaatatgggaaaaattgccattgtcacagacagtaacagcggcataacacaggaccaggcaagagaacttggaatcagcgtaattccaatgcctttttatattaacgagaagctttatcttgaaggaatcactctttcacaggaagagttttatgagagacttaagaatgatgaggctatttctacttcacagccggggccggcagatgtatgcggactctggaatacattactggaaaagtatgatgaagtagtgcacattccaatgtcaagcggactgagtgcatcctgcgatacagcaatgggactggctcaggaatatgacggaagagtacatgtagtagacaatcagagaatttctgttacacagagacaatctgtactggatgccctcacattaagagatgcgggcagaaatgcgacacagatcaaacaggttctggaagagcagaagctggattccagtatctatattactctggaaactttgaaataccttaagaaaggtggaaggattactcctgcagcagcagcaatcggaacagttctgaacctgaaacctgtgcttcagatccagggtgagaagctggatgcatattccaaaacaagaggcaagaagcaggcaaaacgtgtcatgctcaaggctatgcagaatgactgggagaaccgtttcgcagaatacgtaaaacgtggcgaaatgtgcctgcagtctgcttatacaggaaatcaggaggaagcagaggaatttaagaaagaaattgccgaagtattccccgaaattgagattgtgcagaatccgttatcattaagtgttgcatgccatatcggacatggtgctattgcagttgcatgttcaagaaaagtggtagtagaataaaacaatctgaggagttaggaaagaatgaagaaacttatggaacagatggcggaagaactttccgcagcatttgaaaaatccggatacgacccatcctacggaaaagtaaccgtatccaacagaccggatctttgcgaatttcagtgtaacggtgctatggcaggagccaaagcatacaagaaggcaccgtttatgatcgctgatgatgtagtagcatacttaaaagacagccaggttttctccatggcagaagtagtaaaaccgggatttatcaatttaaaagtaaaaggtgaattccttgcagattacttaaaggaaatggcagcagacgagaaactttccgtatctgcagcaaaagagccgaagacgatcatcatcgattatggcggaccaaatgttgcgaaacctcttcatgtaggacaccttcgttctgcaatcattggagaaagtattaagagaatcggtcgctttgtaggacataaagtgatcggtgatgttcatctgggagactggggtcttcagatgggactgatcattacagaactgaaacacagaaaaccggagctggtttattttgatgattcttacacaggagagtatccggaggaagcaccatttacgatcagcgagctggaagagatctatccatgtgcaagcggcaagtccaaagaggatgaagcgtacagaaacgaagctctggaagcaactcatcttcttcagcagggcaaaccgggatacatggctctctggaaccatattatgaacgtatccgttacagacctgaagcgcaactatgacaaattaaatgtgtcttttgatctctggaaaaaggaatccgatgcacagccatatattcccggaatggttgaggagatgaaagaaaaaggattcgcctatgtagaccagggcgcacttgtagtagatgtaaaagaagagaacgatacaaaagaaattcctccatgtatgcttctgaaatcagacggagcttctctttatacaactacagaccttgcaacaatcgtagagcgaatgaaattatttaacccggatgagatcttgtatgtggtagacaaacgtcaggaacttcactttatccaggtattccgctgtgcaagaaagaccgggcttgtaaaagatgatacaaaactttctttccttggattcggaaccatgaacggaaaagacggaaaaccgttcaagacaagagagggcggcgttatgcgtctggaaactctcattaaagacatcaacgaagagatgtttaccaagattgttgagaatcgcagcgtgaaagataaagatgcgaaagaaactgcagagatcgtagggctttccgcgatcaaatacggtgacctttccaatcaggctaccaaggattacatttttgatattgacagatttacatcatttgaaggtaatacaggtccgtatatcctttatacgatcgttcgtatcaaatctattctgaaccgttttgcagaagagggcggcaaccttgaagcaggtgcaatccttgatcctgtaaacgacagccagaagaacctgatgcttcagctgacaggttttggtgcaaccgtagagaacgcctttgaagaaaaagcaccgcataagatctgtgcatatatttacgaagtatccaatgcattcaacagcttctatcatgagacaaagatcctcagcgaagagaacgaagcacagaaagcttccttcatccagttgctgaaactcactaagaaagttctggagacatgtatcgatcttcttggattttctgcaccggacagaatgtaaaaataagattcatcaataaatcaacttgttggtatactagttactgttcacacaccactatcctgcgaggtgtttgggcatgaatatgccaaaatcccgagacatacaagccaaaatttcattgccgcaggcaatctggaatgaattttggctacgttactgagaacggagtgaacagtaacgtatactaagccctgtttacatatattgtaaatggggcttttcaaaaagaacgaaatgtgctatcatgtatttatctaatctatacgtgatgaaattctttcatcacattttccatttttattttaaacgaattgtgaatatctgcttggctcagataaactgcggagcagttattcggttatgagcaagtagcgaatctgatgattttatctgtttgacaattgaacaggaggtgaaccagtgaatttatctggaactgtattaaaagggcgttactgtattctggatcctgttggaaaaggcggcggagggaaagtttaccttgccagagacctggaactgggcgttttgtgggcggtaaaagaaataccggtatccgacaaaagtgaagcccgtatgcttttgaaactttcgcatccgtctttgccaaagatgatagattacatagaagataaccgaaaatgttaccttgttatggaatatgtcaggggaaaatctctgggtgagtatttaagaggcggaaaacatttttccataaatgaaatcgttaaatatggaatggagatttcagatgtattctcctattttcatggtcggaaaccaccggtttattatggagatctgaagcctgacaatctgatgctgggtgagaatggaagattatatctgatcgatctgggcggtgctgtaaacggatataaatatcaccataaagtatgtacaggcactgccggttttgctgcgccggaacaatatgagggaaagataaatgcagcaacagatatttatacatttggaaaaacattatctgccttatgtggaaaaacagattgtctgttattcatccgaaacatgtcattattctggcttattttcagatgctgcatgaagaaaccggaaatgcgttatcaaaatatgaagactgtacagaaaaaactaagcagaatccagaagagacaaaatcagagtaaaattaaaaacatgttggttttggcagggagcagtattgtttttgcagtaataactgtttttcttctgtttagttctgatctggtatccggctccaaaacatttgatttttatgaagagctaactgatattacagacctttattatcaggaagaatttcaaaacggcagtaaagcggacagggaaaaaatttgtgaacaggcagataccggactgcggaaattacaaaaacaatgcactgaaaaagaggagtcaagaaagatattacagattctggcagtaaacagtgagtaccaggaaaattatgaaaatgcaggattctactatgagcaaatgcttctttatgatgaaacttacagagccggatacggtgaatatggaatgttcctgttccgtaccgggcaaaaggaagccggtcaggcactatggacagaatataagtcgaaagaaacaatgttagacgatacagtcagcagaaatctgagattgtgggaaaaggagatgactaagagtgaagaaaaatcataacagactctggattgtgacatttgtatgtttatgtctgtgtctgacttcgactatctctgccatgcagatgggaggttttgatattgatgtaggaaatggagaaaacagcagctggcaatggcatgaggaacagcagtggaatcagagcagttgggagaatacgtgggaaaataaccggcagactggagacaacacatcagaaactcctgcacagaacgatcagacgcaggacaatggatatcagtatgattctgatacaggaaacggaacacaggataatatacagcaatggaatggtgtacagcagaataacactgactggaataacagcagtcaatggaacaataattctcagtgggataataattctcagaataataatgtccagaataataatgcccagaataataacgttcagagtaataatgcccggaataataattctgcatggaacgctcaacctcagacagataacaatatgcagataacatcccggacggataatgaatccgctgttaagatatcagaaaaacccaccccaacatcaatacctgtaccaacacctaaacctgcgaaaaatccgaagccgacaaaaacacccaaatcaactcagcccccaactcctaagccgtcaaaaaagaaaaataagaagaaacaaaataaagcaaagaaaacagaaaaagaaaacaagaatacaggtaattccaaagtgtttcagaataaagaaaaccagggggatactgttgaatacacgcatgtaaaagatgaagctgttaagtttcattgcacacaaaatacagatagtttccataccccgcgaattcagataatatcccggggctctgttcagattctttcttttcggcttaacaaaacagaatgtccctggcattgggaaggagacaggatcataccggagacagaagataaaaatgtaaaagaaatagaattgttggttatttctcaaggtggaaagctgataaaaatggatccctggattttttctgcatagacgcttcaggaaaacaatgatataatctatcatattatatcaatttttctgagacaggaggaatctatgtacaaagtaattttgtttgatttagatggaacattaacagaatccggagagggtatcaccaagtctgttcaatatgcactggagagaatcggcaagcctgaaccagaccttgagaaactgaaggttttcataggaccgccacttatggagatgtttatgcaatatgcacagattgatgaggcaaccgcaaaacaggcggtggaaatttacagagaacgctattctgtgacaggaatctttgaaaatgccgtatatccgggaattgagaacatgctggcacagttggagaagaaaggatatattctcgcagtagcatcttctaaaccggaagtatatgtgagacagatcctggatcattttggacttacccggtacttcacagaaatcggcggaagcgaattgaatggtcgaagaacaaacaagacagaagtgatcgaagatgttctgaaacgtctgaatatggacaaacacagagatcaggttattatggttggagataaagaacatgatgtatacggagcacgcaaagctggcctggaatgtattgcagtttctttcggatatggaactgaagaagagcttaaacaggcagaacctctgaaaatcgttgattctgcagaaggaatcgtagattttttcgcctgagccctctgcgaaaacaaaatattgtttctaaaatctggagggcaggatatccggcaggaatccattttgtgatttcgcagatcgttgcagggactgcgttggcagtatttgcaagaacagcagaaaattcggcagagacatactataattacacgatttttctcacaggcttaacaggaatcctggctatgatcccggcattgtatttttatcgaagagataaagttagaagaattgccggcggcctgatcccggcgcagaaaaaagtaccgctttctatatcggaaacagttcttttacttctggcaggagccggatttgcacaatatggaaacttcctgatggcaatacttcagtcatttatcaacagcaccacctatcaggagagcatgaccagaattacagaaggaaaatcacttcttatgatgattttctggatgggaattattgcacctgcggcggaggaaatgatcttccgctggttaatctatctgcgtctgcgtgactggctgaagatgccggtggcagcagtgatttccgggttgatatttggtatctatcacggaaatatcgtacagggaatttacgcaagtatcctcggaactgcatttgcatggatactggaaatgagtggaaatatttacagcagtatgctgctccatatgggagcaaacatctggtcactgcttatctcagaatatgcactggatctgttttccatgaaatacggtgtgcagattttgatattgatctatctgattctgctggccggcgtagtgtgctgccttactcatttcgaaaaagtgtacagtgtaagaaaaaagaagagaatgatataaaaaaatctgccatagaaagcagatgataatcaacaggagaatgtgatgggaaaagcagttcgtcttgataagtttctggcagatgcaggagcagggaccagaagtgaggtaaaaaaatatattcaaaaaggaaaagtccggatcaacggtgtgcctgcaaagaaaccggagatcaaggtcagtgaagaggatgaagtaattctggatggaaacagagtttccagggcaccggaattcgtctattatcttctgcacaaacctgcaggttatgtcagtgcaacagaggataagcgtgacagaacagtgatggaactggtgccgtcagacaggaaagatatgtttcctgtaggaagactggataaagatacagagggcctgcttctgatcacagatgacggagcactggcacatgaacttctttctccgaagaagcatgtagacaaaacttactatgctgtcacagatggctgcgtgacaaaagaggatgtacagagatttgctgagggtctggagattggagaaaaaaatccgactatgcctgcgaaactggaaatcctcagaaccagaaaagtggaagaggcagaactggaacagtatccgtcaggatggtcttcggaaattcagcttacgatcaaagaaggcaaattccatcaggtcaagcgaatgacagaagcagtaggaaagaaagtggtctatctgaaacgaatttccatgggagtattaacattgccggatgacctgaaaaaaggagaatgccgtcagttgactgctgaagaagagaaaaaactgaaagacagcattggcagatcctgaaaaacctgtaaaaataataaaaaatttgcaaaaaaccctctttacatggagggtttttgtatgctatactacagaagttgcgagtcatgcgcatctattgtgcatgcaaaaatatacacgttcggagattcccgcggatggtgccctgcggtgtgaggctgggtccccaggaaaaagaaccgggcggaagaaattaaccaaaaaggagaacaaacatgagcgttatttcaatgaaacagcttttagaagcaggcgtacatttcggacatcagacaagaagatggaaccctaaaatggctccatacatctacacagagagaaacggtatctacatcatcgacttacagcagtctgtaggtatggttgacgatgcttacaatgcaatcgctgatatcgtagcagacggtggaagcatcttattcgtaggaacaaagaaacaggctcaggatgctatcaaaacagaagcagagcgttgcggacagttctatgtaaacgagagatggttaggtggtatgcttacaaacttcaaaactatccagagccgtattgcaagactgaaagaaatcgaagctatggaagctgatggaacatttgacgttcttcctaagaaagaagttattgagctgaaaaaagaacttgcaaaattacagaaaaacatcggcggtatcaaagaaatgaagagacttccggatgcaatcttcatcgtagatcctaagaaagaaagaatctgcgtacaggaagctcatacattaggaatcccgcttatcggtatctgcgatacaaactgtgatccggaagaactggattatgtaattccgggtaacgatgatgcaatccgtgcagtaaaattaatcgtttccaaaatggcagacgctgttatcgaagcaaaacagggtactgcagatgtagacgatgaaatcgaagctgaatctgaagagttcgcagctacagaagaataattttttgaaccagtacaggaaagccgacaggctttcctgtcattgaaaaaggaaaagcccctccgggcgatttacgaatattattcaggaggaaaatgaaatggctatcacagcagcacaggtaaaagaattaagagaaatgaccggcgccggaatgatggattgtaagaaagctcttacagctacagaaggtgatatggataaagcagtagaattccttcgcgaaaaaggtcttgctacagcacagaagaaagcaagccgtgtagcagcagaaggtctttgcaaaactttagtttccgaagacggaaagaaagcagttgttgtagaagttaacgctgagacagacttcgtagctaagaatgaaaaattccagaactacgttgcagatgtagcagctcaggctatgaacacaacagcagcagatatcgatgctttccttgcagaagcatgggcacttgatacaactaagactgttaaagaagctcttgcagctcagatcgcagttatcggcgagaacatgaacatcagaagatttgctcaggttacagaagagaacggtttcgttgcttcctacacacatatgggcggtaagatcggtgttcttgtagacgttgaaacagacgtagttaacgatgctgttaaagaaatggctaagaacgtagcaatgcagattgcagctctgaaaccacagtacacaagcgatagcgaagtaagcgcagaatacattgagcatgagaaagaaatccttatggctcagattcagaacgatccgaaagaatcccagaaaccggctaaggttatcgaaggaatgattacaggacgtatcaaaaaagagcttaaagaaatctgccttcttgaccagacatacgttaaagctgaagacggaaaacagtctgtagctaaatacgtagagcaggttgctaaagaaaacggtgctaagattactgttaaaggtttcgtacgttacgagacaggtgatggtatcgaaaagaaagaagagaactttgcagaagaagttgcaaaacagatggcacagtaatctgttttttgcagaactttaaaaagagtcttaaaacccttgaaaatccagtattttcaagggtttttcttatatacatcacttcatatattgcattataatatgtgcaacagcaatatggaacactcccagaatatctatggagcaaatgacattttggaagaatacagaaagtgtgagtaaagaaattatggaattgttgaaaacaatcagaggagacattacaaaaattacagatgttcaggcaatcgtaaatgctgcgaataattcacttcttggtggcggaggtgtggatggagcaattcacagagcagcaggaccagaacttttggaaggatgcagaacattacatggatgtgagacagggaaggcaaaaattacaaaagcatataagctcccttgtgagtatgttatccatacagtaggaccaatatggaatggtgggaatcaaaatgaaaaagaattacttgcaagctgttatttatcttctatgcagctggcactggaacacaaaatcagaaaaatcgcatttccgtcaatttctacaggagtgtattcatttccggttggacttgcagcaaaaattgcagtaaatacagttactggatttttgaaggaacatccagatgattttgatctggtggagtgggttttgtttgatgaacatacggaattggtttatgcgatagaagtaaatgcgcataataaaggaatatagaagatgagaatattgatgttaggaaacagttttacaacggcaaatcatatgccggacatgttggctgagttgaccggtgcagagattgtgcaacatacccgtggaggggaacgattggcagatcagttaaatccgaaaacaaagatgggaaagcgtacacaggaagctttgcaaaatgaaaaatgggattttgtcattttacaggaaatgagcaatggtccaattacatcaaaagccagtttccttgaaaatgcagaaaaactctgtgagaagatcagggagaatggagcaaagccagttttttatgcgacctgggcatatcaacgtggaggaaagaagttggaaacttttgaaatggattatgatgagatgtatcagaaactgtatgaagcttatcacctagcagcagatagaaaccatactttgattgcagatgttggaaagaaattttatgaactttcagataaagtaaatctttatgcggatgatgggtgccatccaaatgaaaaaggttcccagatagcagcagagataattgcagaagtcttgatgaattgaataacgtgatatgaaaaaagcagcttgattatcgagttagttactctcggttcaaactgcttttcttttgggctttatctctcatacaggagtattgtcatcatcaagttggaaaatatcggctatctgggattctatttttatgaaatcgtggtgccacaggcaaaagaaactgctttgtccatggctgcggatggaatgaaagctgaaaaaatagcccactatcttaaagtaagtgctgcgatggttcagaactggatcgatgaaagcatgagtgttgtacaataatttaatgatataatgaagagaaactgccaggagataagaaaaatctcttggtggcttttgggaattaaacctatgatttttttgtaaaatagttctatagaactatccataggtatactaattttagggatttttttaaagtttaaactatcttcattttgcggcaaaaaataaatttcatctttcaattactactgaggatgtcgaaatgtggtattaaccgacatcctcttatgatatcatcctgcatatctaacttccataaattgtctttcgttatcagcaatcggtggattttccagcgctttaatccagtagatttctccatcgcattctaactgaatatacatctttccatttatgagtgcgcatttaatgatttttgttaatgatccagttttcagtgttgtgttcaccgcagtagcgcctggtctggtatacaccggaagatcactgtttactgtgaaatatcggctgcttccatctgcggaatatatttctttgtaagatccatatctgcttgtcggaacaaattttccattgacatattcgtaggtgaaattaattgcattgataccaagagaataagaaacgatgctctctgtaattacaatcttatttccatttaagttggtaacttcacctatgcgatggtctccgtatcctgccataatctcagtgaaatcaagggcctttctgaactttccgtttgtgtattttaataatgcacatacaggtccgtcaccattctcggctggtgcatagagatataaaaacggctgtccgtttttcaatgtataaatatttgctataacattataaaaacgtgtattttttaatctgtaagctgtttttccattaaccgatacagtaagtgacgaatatgcttcatcgtcggtttgattggatgctctgattctgattttatctttcgttccatcaccggtaacatcatatgctgtgtatgtccgatttgcttttaattggaccccatttgccgttgcttttacgggtatggagaagataattgcaaaaccaattgccagaaacatagtaaacacagaaataaaattgtttctttttctcataaaacatgacccctttcgtgtaggaattgctataatttttatatttttattgtatcattgtatatgtgcaaactgtattttttacattacaaaatcctgagataattttatgagaaccaattctcttctcggtgcatctaattagtgtaaaagtaaaaaagcaaacacgtgtagtaattcggctggacaaaaggagaagacaaagttatgacaaaagatatatttattaaggaggttcgggatgcagaagccatgctgtatcatatatcaaagtccattctgaagaatgactctgattgtggggatgctgtgcaggaaacaattcttaaggcatatgagaaacttcccaccttaaagaaagaaaagtattttcgaacatggatcacaaagatattgatcaatgaatgcaatgggattcttcggaaaagaaaaaatgttattccatatgaagaatatatggacaatatgaggctgactgaggaggacagatacagtcatctgtatatggcgattatggaacttccggaggatctgaggattttggtaacattgtattatttagaagaattctcacagaaagagatcagtgaggctctggatattccggaaggaacgattaaaagcagactttcccgtgcaagagagtttttgaaagcacagttatccgatgaagaagagaaaagaccgatgcctgggaaaaacagcaaaccatcaaagagaataacaggaaaggggaaaatgtcatgttagagaacaaatggaataatatagcaccggaagtaccacaggattttcatgagaaatttgaagagacactgagacatattgagcaggcagatgcagttaataaaaaatacaaaagaaaaagaatcagtggccgattactgattgcagcagcagtgatctgtacaggcatgggagtcacagtggcggcaaaagaattctttaaatggaatgaccatctgttaaaaagacttgaaccatctgagaaacagcaggaaacgatgcaggaatcaacctatattcagaatataaaccagtctgtaacgcagaacggtgtgactgttaccctgacagattctattcaggatcagggattcctgtatgcattttttgaagtggaaacagacgacaatattcctatgactgatcatacttcttttgaggagatggcacattttaagattgatggaaaagaagtatatgcagtggacgataacagatttggaagtttcaatactggggtaggacaggatatgttactgaaaacagatcaaaattctacacatcttaaatattttaacgcctgtatatcttatgacggtgattatgatctgagtaataaaacagtagaaatcacattaaagaatcttacggaggaaggagattatgatacgactgttattacagatggaacatgggattttaaatggactctgggtgcagtaaagcctccgacaactctggaagtgaaccggaaatgtgattttggaggttatgaaatcacagtgaaaaaaatggaagtaacgccccttttatggtcattatatcttgattatgatgaagctatgaaggtgtatgaagatgaaaaaaacaaatttgagtacgcaggtacggactatggcatggatctttatgtcagaactagtattgaccaggtgcgctataaagatggaacggttttaacacttgataggaccatgggaggcatcgctggcggtggagaaaaacaggataaggaaaatggtgtcctgatcatcagaaacagcttcccgcaattggttgatgtagataacctgcaggcggtacattttggaaacattgaccagtggcttgaagtgcgggaataaaggttttttcggtgatacagaaaaattctcccataattagataatgagagaatacaaaaagaaccgatacaaggtctttgcaagactgatatcggttctttttggctaagtctgccaactgtaaaattttgtttatatattaacgcatcctgttcatgtacaggaaacggattctagcgtatactgaaattattgattacaaggtctacatgaactgcaaatacagattccgggttatatccggaagccatattttgcacttactggtaaaatctgtaatagttggcataaaagttcattacatattcgatataagctttaaattttttcattgtctgttcctcctcttctttacgggacggggaacatgcactggggcttttgaaaaaccagctccgttataccagggaggaaaatatctcctgtgtgggaggcggcatttatcccaacatgctgtgtgcacaccctccgttccagattgatgggaattttggctttgcagctgcagttgcagagatgcttatccagagcaggaaagggtatatcctgttacttccggcacttccggatgaatggaaggatggaaaagcccggggaatgaaggcacagggtgacatcacagttgattttgaatggagagagggcaggatacacagggttcgcctctgttcttcccatgagcagaaagtaacgctggaatgtaatggaatttcgaaaacagtatttttaaaacctgatgggacagagaatatgatttttgattgatctgtcctgaggggctggaatcattggcagccgtatcatgtaaaagcacatggtacggctgtttttagtacctggaatattttatagcaccttgactgataatcatgaaaagcatggaagtgttcaaactaatcttttggggattttctgagattgttaaaaaaaattgcaacttttttgggagtttgcacgtctaataagtagaagcacataaagaaaagattttatacaatatttcctgatgaccggtctgatataggagaagggagacgacaatgaatgagattttgatacgaaaagcaaagaaaggcgataaagatgctttttgtcggcttatagatgagaatgtacagagtatgtacaaggttgcagcggcatatctgaaaaatgatgaagatgttgcggatgcaatacaggatacgattctttcctgctatgaaaatttgaaaagtctgaaacagaacagatatttcaagacatggatgatccgaattctgatcaataagtgcaaggacatgatacagaagaaaaagctggttacttatacggatcagatgccggaaacgccttttcacgaagaaaaatatgcagcaatggaatggatccaggtcttagagccattggacagtaaataccgcttggttgttcttctatactatatggaaggatttggtatccgggaaatcagtgacattctggatatgaaggaaagcactgtaaaatctcgtctttatcgtggcagaaaacagattgcagagatgtatggatataaggttaaggagggacgtgcctaatgatgactttaaattataatgagaaagacttccagaaaaaacttcaaaaggacatagaaatgccggaaatcgtgcatgaacatattaatcaggcatatcgtttgattgaaaataacgctgttttacagaaaaaagcatcaaaggatccatatcattggatgaaaagtggaggcaggatagcaggagggatggcagcggtactggcagtaggatttgtattctgtgcaatcaatccggtaatggcaaaaaatgtcccggttgtaggaggactctttgaaattttacaggataatgtgagtttctttggtgacttttcagatcatgcaacaactttggaagctgttgatggaacgaagacagatagcagtgaaacagacggagccaagacagatcatgccaataatgatgctatttacactaagacagcagatgggctgacaattacatgttctgaggtatatgcaaacagccaggcaatttatgtgactatgcagtttaaaagtgataaaccgttcccagaaacagaaactggggcggaaagtggaacaccagtcattgatctggatatgacagggggtgtggactttaattcagaggctagcccggtaattgacggtcaagtggaaggaaaatttctggatgataacacctatgcatgtattttccgttatgatttggctgaagccgcaaaagattatacggaatataatgagaaatacaatgaaatgacacagcaggtaatggatgagatgggaataactcaggcggacttagatgatcagacggatgaaggttatgcgctgctggaagagtttatcaataaattgtctgaacgtggtggagaatatcagaagtacattaaagatattgatattccagatacctttaacctgcatctggatattacgaaggtaagaggactggaagcaaactatcagtggtcagaagaggatgagaaaaaatatggaagggatgctggctactacaaatatgaaggtgactggagcttcgatatcccggttacggtagatgattcccagacagaagtattggaactcaatgatacaaacgatgcaggtattggacttaaatcggtgattcgtactccatatgaattgacggtaaatgaactttataaggaaggttccaacagtgattgctttatggtagctcttgatgccaatggaaacacacttccgtacaatgagtctactggaaactgtaataacttcgcaattcaggacagagatatttctacggtagacatttattttctggattatgtccagtatatggatgagctgaaaggccagcagaattttgataatcctacgaaagaggatggacaaaaatggaaaaaacttctggaggagaatgcgaagtaccataagacattgcattttgacaatgacaatgtaaaaaactagttgatataaaagaaagatgaataagatatgagacaaaaagaagtgatggggcaatcaataagaacttcaaaatcggcaagacccggaacaattacttatgtgccgatagacaagtctgaattcagatctactgtatcttcagacaaaaagaaaaacaaaattatgaaaatagttgtaatgcttatagtgatgattttggttatgagctgttgtgtgtatgcaggtatatcttattattactcatatcacttctttttgggtacgaccatcaatggaattgacagttcaaataagacagcttatgaagttgagcaggagattgcagggaaaaaggataactatgttattcaggtaagtgcaaggatgcaggaacctcagactattacaggtaaagacattgattatcaatatgtatccagcggggaaatccttcagctgctgaagactcagaaaccatgggaatggatcagaggtttttttgaaacgaaaaattatatggttcaagaagagactgttttcagtcgggaaaagctagaaaaacaggtaagttcattaaattgtgcccaaaaagagaatcagatagcaccggaaaatgcgtatgtaagttttgctaattcagaatttactattatgccagagacagaaggcagtgaattaaatgccaaggaagcttatcagatgataagcagagcaattgataatgaggcggcagatgtagatctgggaagcaatccaaaggcttataaggaagcagatgtgacgagagatagttcagaacttcagaatatggtaaatatgtataatagcctggcaaaagcaaatatcacatatacatttggagatgaaacggtaacacttgacgggaataccatcaaaaactggctgcagtttgacgagaaagggcagttgcttccggatgatggagccttcaggcagcatgtagtggattatgtggcacagcttgcagcagatcatgatacagttggtactgaaagacaatttgagaccacaagcggaaggattgtgtatgtatatggctcagcctatggatggaagattgatcaggacaaggaagcagcacagctcatgcaggaaattcaatcaggaacccagacaaccagggaaccggtatattctatgagagcaaatgcacatgggatcaatgatctcggagatacatatatagaggtagatcttacagagcagtatatgtggtattatcagaatggaaatattatttttcaatcagaaatcgtatccggactgccaggtgatccggatagaaaaacaccccctggaatattcacactgaattcaaagagcagtccgtctgtgctgcgaggtgaaatgacagcaaatggaacctattcttatgaacagccggtaacgtactggatgccattcaatggaggaattggctttcatgatgcagactggcagccgtactttggtggtgacagatatcttacaggtggttctcatggatgcatcaatcttcccccggaaaatgccgggcagctttatagtcttattcagtatgatgtcccgataatttgtttttactaattctatattattctgccagacggctttaattaatatgttttcaatccgccggatatttgtttttggaaaagaagacctcatttttaaagaataaaaaaatacctgtgatgtgggcaaaactttttcaggatcttttaaaagattgtgaccgggagatatattcaaatccgcaattttatacatggaagaaaacaaagtaatagtaagtcgaatggccgtgtattaaaattaggtaatgtaattgaagaaaagatatgatatcatatgggtaacaaattgaactgtgtgtggaggtgatggctgtgaagaaaaaagtgacaatagtgttggtcattattagtattgttgctataagtacaatgattatgttttcaacatataagtcttcagaagactgtcgaaaagcaaatgccgcgatacagtgggattgttctgtaacctgtgcggaagagtcaacgcctgattcttatgtaattacatattccgatgcaaaaatttcatccaaaacaggcgtgttgacggttcagaacagaaacgattttgacattattgtgtatttgctctgcgaaggaaaacaggaactcgtatctggcaggattcctgcgggtggctgctattcttttctgaacgttacagatgaagaacacacggtaggtattcatgctgatgttggtgaaaatacggatataaaagtatttgtatatgacggaaaagacaccgaaccatatacaagataattgataagacgaagaatattgaaaaaaatattcgcagatattttgggatatgaagttcaggaatggataatggatttggaagcattaggaattcactcatatgacttggatgatctggcacaaacacagaaaatattccactgccaataaaaaaggcagcttttccctatatctacacgccataggtatcgaaaacctatggcgttttttataaaatttttttcttgaaagcaaatggctgtttttcaagtctaataattataagaagaaagggaggtactttatggatgctttaataacagaggctaaaaatggagataaagaagcatttgtcagattaatccggatgaataagcagagcctgtataaaactgcctggatttatcttcgggatgagcaggacattgcagatgccctgcaaaatacaatcctatcctgctatgaaaatatacagagactgagagaaccgaaatattttaaaacctggctgatgcggatccttataaatgagtgcaaggacattctctgccaaaagaaccatgcagcagaactggatgattttgcagaaggtgtacattgtgaagaactgaatctctgtgaatggaaacaattgcttttatgcctggatgaagaaagtaggaaaatcgtggaactctattattttgatgaattttcagttaaggaaatcagtgcccttcttgaaatgaacagcaataccgtatcaaccaaactttcccgggcaagagcaaaattaaaaaaggtgatcaggaggtgagactatatgagggaaatcagaaggattttaaaagaagaaactgcaataccggaaaatattgataaagccatggaagatgttctgagtggaattttaaattccccagacgagaaaacaacgggggctttaaataaaaaaacagatggagaaagaacgaaaaattcaggaaataagaaaaaaataattcggattcttcttccggtagctgctatattaggagttagtactggtgtacttgcaacaaatatcggacgactgtataaagaacttgaacaacagggtgtcgctgaacaggaggcagctcaaatggttgtcacagaacctgagtcaactgcagaaaatgtggaaaatattacttcttatccaataactcccgaggtggtcgattggaatcagtccatgctgactgttaaagaagcgtattttgatggcggcggtttaagttttgtgggagaaccttccaatgaggcaaagaattatatgatcacttgccgtgatcatgcaacggtgaatggaaaagatgcactggcttctttaaataaaatagaaggagaagatctttattatgggcatattactttgtatgatgacgctttgattgagaaaatattaaatgaagattctgaagtagaactttccatgactattcaggcatatcctgtttatgacggtaaaatttattatacctggaaagacactgaagcttacgaaaagatttttaaaactggttcttttacagattcagaaggaagggtttcttatgcacttcctgcggaggacgtttacagaggatatacgcctcagactcttacgttaacccttccattaaaggatgaagtaagggacatcattgaaaaatatagaaaagaagggaaattgcaggctgctgacaccggagtagaaccatcttcgggtgagagtacgcagaacacaacagatttggaaatttcgtcaaatactacgagtgtaaatgaaaaatatgatccggagaaaacaatgttgcaggtaaaggaaaaccatgtaacagcttctctgccagggaaatcaggaacccttacaatagaagctgatattaccggaaatactgatgacgtttcaaagggagttctgaaaaaatgcaatatatcagagaaagacatctgctcctggtttggtgggaaagatggatgggaaaaatctgtaacagatgaaacggtctgggaaaataaagaaaaaggactgcagttatttatttcggatgggatgatagagtgtgatggattaagtgaaaaagatctgggatttttaggcgagaatacggaagatgagaaattaaatattataaatcaactgttttccaaagctgatttatctggaacttctgtaagaaaaccaattagcgacatgacggaaggatatgattattacgacatagaagttctgttgaatggaataccggcaggtggactttctcagtatcattatcagggaagcacaggatttggtctcaatcctgaagactgctatttcaaaataccaatcccgcttcaggtgaaagagaaagaaacagttactatgcttcccatggaagaaattatgaaatcggtggaacaatatgtaaaagaaggaaaaatcggattttttacggaagaggacacgacggagaaaacagaaccaatcacgattccagttacgaaaatccgcctgaaatattatattgatgaaactgcagatggaattgtttacagacctgtatggagtttttgctgtccctaccaatggaaggattcaccagaagaacaggaattgttttatatagacggagaaaccggggctttgatccgggacgcatttggatggtagacatgaaaaacaaattttatggggaacatgaccatggatgatgctatagcttctaaggcaaagctttcgtcataggccttgcatctgcttgaagatagttaagaatagttaaggtacagttaaatgaacaggtaagaattaaatgttattgtataagtacattctaagagataactcttagaaaataatacatgaggagaaaagtaaaggagcatttatgaaaataaaatgtacgttccatattgcaatagcattcattcttattcagcttacggatgaatttagtatagcatttgcatatgggatatgtgagaagaatccatatgtgagaattctatatgtgacatttgcgattttgagcctgctgactatgatatatttatatacgaagtatattataagaattcaaatgcaggatttgtttttaggaatgccgcttccgaaaaaaaagtggtgtataacagcggtattaatgccggtattaatatgccttttttatatattttttacaaagggaacatttgaaaaaggaaaccttacatataaagaaatcatagatgtagttacaatttctattttatcatcaggtattaaagcggcagtaacagaagaaattgtctttcgtggtatgattttaagattgtctcagaatacttttggaaagatatgtgcagtgtttgtttcaagttttttattcgctgtttatcattttgatgggattgatacttctgatataaaaaaagtaattatgatgattatttctgttgaaattgcaggaattgcattggcacttgttacagagcagacaggttctatatggtcttcggttatgattcattgtctgtataatattctatcaggagaaagccagatttttcatattgatgtggcacagaactttcctgcaatatggatgtatactgtaaacagtaaaaatatgttgcttacaggaattaatggttcggtagggtttacagcttcaattccaacaatggcaggatttaccgggatcatattaatggtgatttatgatgaaaaaaagaaaaaaacatatgggaaaaagttgtagtaaaattattcttctgattttaattctggcagcatggatagttgtgacagtaagagcgaaaaaaactgaagagggtattatattgacagacgcttacaaaaaacagataatggaaagtgcagagtggaagaagatatttttacatacagaaaattatccggatattcttttagaggatttaaaaagaaatccggaaatgctggaatttgtcgaaggatacaatgatgtacataagaagtcttctgaaggacttacatttgaggaacagaagaaaaaagttcctttatttattcaatgggataaaagatggggatatgaaccttatggaacaagtgatataggaatttccggatgtggtccgacgtgcatggcaatggtaatatacagtttaaccagaaatacagaggcaacaccacctgtgcttgcgcaaaaatccatgaacgagggatattatgtagagggtattggaacatcctggaaattcatgagagaagctgctttggattacggtgtaattgcttcgcaatttgatatgctgggagaacaggaaatggccgacagacttaaagatggaaatctgataatctgtgctatgggtcccggagattttacaaattcagggcattttattgttatttatgattattccagaaagaaattttctgtaaacgatccattcagctatacaaacagttcaaaaaaatgggaatatacgaccctgatttctcaatgtcagcaaatatgggtatatgcagtttagaagacgaaaggatgaaaatggataatcatattttggttgtagaagatgatgcagcaattagagaaggagtgaggatacttcttgaaggtgagggatatattgttcaggaagcagaggatggatatcagtgtttgaaaaaagtatcagatgatattgaccttgttattcttgatattatgatgccgggaatatccgggataaaaacttgtgaagaaattcgaaaaatctcacatgttccagtgttgtttctgacagccaaaagtcaggaatctgataaattactcggacttatggcaggaggtgatgactatctcgtgaaaccattttcgtatgcggaacttcttgcccgggttaaagcgttactacgaagatatcatgtatatagtcagacattacaaggtgagaagacaaaagaacattggattgaatatgggaaagtaaaagtgaatactcaatgtaatgaggtattccgcaatgaaaaggaaatcagtctcagagaaatggaatacagaatcttattgcttatgatggaaaacccgaaaaaggtattctcggtaaaaaatctttatgagagtttgtgggaggagccgttcttatattcatctggaaatactgttatggtacatatccgaagattacgaatgaaaatcgaagatgatccacaaaagccaaagatgattcaaaccgtatggggaaagggatatcgccttggataaaatttgcggaaatagtttgacaggcaagataatttgctatcttatgcaggggttattagcaggtttattagtgttaagcgtgacatatttcgggggaaaggggttactgcaacgctttttctttcgtacaggatatgtttatgctgaagagatagaacgtgcagaagaacttcaggaatatgtcacacaaaataagttgagtgcatctgattataaaatgttgaaaaaatggggtacagaacgaaatattgatgacttcacgatttcaaggggaaaatggctgctgtttgatatttcctacaacggtaaaattatgtatggcagcagagaaataccaaatctgacatggagaatgtaccacagaatttcatttaaggatggaacggcagatgtatatatatatgaaggaacagcggataaatattttaacatattgatggtcttttctgttgtacttggagtcgcggcgtgtattggaattgttgtatccggaatgtatgagaatgtaaaatatatacaatgccttatgaaagaggtaaatataatcagcagaggaaatttgcaggggaatgtaactgttcagggaacagatgaaattgcacagttagccagtggactggaacatatgagacaaacattggtgaaaaaagagcagatagagtatgacctgaagagtgcacaggagaagctggtgttaggaatgtcacatgatctgcgtactcctctgactggtttgatggcatatcttgagattctaaaaaagcagcaaaaggaaggtgcggttactcaggaatatataaataaagcctttgatcgtatacttcagatcagagatttgtcggagcagatgtttgaatatttttttgtaaattcacgacaccatatagaactggaacctgcagaagatattatgtgtgcttttggagattatctttctgaactgtgtgctttactggaatatgaaggatttaaagtaaatacagatcggttggagtggagacagatatctgtatgtataaatacagattttattggcagaattatgaataatattatttctaatattgaaaaatatggaaaacatgaaaatgaggtatgtatacagctttgttatgggaatgaagaagtaggaatcagtattcaaaatagtattaccaggtttgattctgagcatcaaaaaacagggattgggttgcagaatatttctattatgatggagcagatggatgggcgaatggaagttaacgcagacgatttaacttattgtatagttttgtattttccagagaaaaaagagtatcataaaatttcaaaagtatagagaaatctgttggcatagatgcctgttcaggcagacaatcataaacgaggtatccgcagagtagaaaattatttacacgccataggcattggaaaaaacctatggcgctttttatgtccatttctgaaggagtaccggaaataaaactggcaaaagtaaaaatgaagagtattcatggtacagcttccattccttatttttgctgatatgaagcaggcagaaagccaggaagacgatgtatcaattgaaggtatgagaatccttttggccgaagacaatgaattgaacatggaaattgcggaattccttctgacaaatgcaggagcagaaattacaaaggcttcaaacggtaaggaagctgttgaagcatttgaaaaatcaggtgttggtgagatcaatgtaattctgatggatattatgatgccagttatggatggtctggaagccaccagagaaatacgcacaatgaacagaagtgatgcatctgctgttgcgattatagccatgacagcaaatgcctttgcagaagacaagagtaaagcgttgaaagccggaatggacgaatatcttaccaaaccgctggagtcagaaaaactgattcgtgccttaagcagatataaatacaattaacaataacataacagtaacattcttattagtctgattcagctatagaaacagggtgtggtgcggaatgattatacgcaaatttattaaaataaaagatgataaaagaaataaaaggatatataaaaaaagaattgacaattgtattctacagttgtagaatacaattaacttctacagatgtagaaaataaaattctaggagaatccacgatgaagacaaaatttatgacacttatgacggtagcaacacttgggattttttcagctgcaacggttatggctgcaggaaataacgatttctatacacagccgccgactggatctgaatgggaaaaagcagatactgaaggtacctatgcaagctatacgaacggaaatgattatgtaaatatctataaatattcactggaggatgtcaaaacagggattgccaaatgcaatgacacatacgatgcctgctatcagacaatttattcagagggaaatagcctgtatatggcagtgggatatgcaaaagatgcagatgacatcagtgacgtcagaaaatttgtagaatatatttcttatcccggaaatccttcgcttaccagacaggagaacgaaaaccagacagatgattcttctgatgattctgataaggcaactacagatactgccagtcagaagtcaggaggagattcagatatccttactacctccccaatgacattagttgacagtgatggaaataccattgagattaattacattcttcacaaagattattcttgtgaatatcgtggagatgatggaatgaactataccgataatggggatgaaacttataccgacgaaaatggaaatacctactcagctctgaatgatgacactcatcatctgggacatacattggagcagcatgatcttcaggatgcaaacggtaatactgtaacggttacggaaactacaaatggtgattattatttccaggacgaaaatggtacaggatttacggacaacggagacgggacatggagtgatgaaaatggcaacagttatacagaaatagactgatagtggttagtagctgcaggaatggcaagggtatttgcaaattgtgcaaaagcccttgccatttccgtgaaccgtggtaaaatagaattattcctacatttgtagaaaatatgtaacaggaggtgtgaaaaagtgaaaaaaacttaccagagacttccggaatcagagctggatattatgctcgttctttggaataatactccgccgatgaccagaccggagattgagaaagtgatcaatatgaagaaaaatcttgcatcaacaacaattttgtcattgctgaccagattggagaacaaaaatttcgtggaagtgacgaaacagggaaaaatgaatctgtatacacccttggtttcgcagtcagattatcaggcacatgaaagccagagtgttcttgagaaactttatgggaattcactaaaaaagtttgtaacttcactttatcatggaaagaaaatcagctcggaagaagtccaggatctcagtgaatttcttaagaacctggaggacagggaggaatagcgaattatggaggttttcattctgcacattctgaaactgaacattattgcagcagtagtaattttactggtaaaagtgcttgcgactctgtttaaaggacgtgtatcagcgagatggaagtactttatctggctgttgattacgataagcctttgtgttccggtgcgccttccggcgaatctggcactggtggatttcaaagtacttagaagcagtcaacagaatacgcaaaacccgaagataacggattacgcagtcagaccagaggaaagtcagaagataacagaaaccgtatcatctgcgagcaatgacatgaaaaatctgacagaaatcccggaacaaaagagaactgtcaggtatgaatcagataaatggatgggaattgtggctgtgatttttgctgccgtctggctgagcgtagcggtacttaaactgacaggagaattgctggcatattatttttctataaggaatctggaacggatgagtctgcaggtaagtgatacagtgagtattcagatgtaccgtgcagcatgtcaaaagaagcacgtacgcagaagaccggagctcaggcaaaacgcaggtcttaccacaccgcttcttgcgggactttttcatacaaaattgtatctaccagcaaccgggtattcagcagaagaaagaaaacttatcttttaccatgaacttacacattattgtcatcgggatctctggtataagatgctccttcgaatctgtgcatcgatatactggttcaatccctttcttcttatcatgctgaaagaagcggataaggatattgagaatctgtgtgatacagcagttgttcgcagagttaataaaaaagaacataaattatatcgacagctgcttctcaggacagtggccatggaaaatcagattccatatgtgtcagcaagtcttaatgacagtgaaatggtgtttaaagatcggattctgtatatggtgaacattcggaagcttcgcagaggaattcttccgggaattcttgtgacgttgctgcttgcaggcggtaatctggtatttaatgtttctgccgggacagatacagtttcagtagagacggagaagtctggtattgaaaaaaatgcagatccagagaaaaataatgtaccggattacgcaccgttttctgaaatggtaactatgcagaaagctgctgaaacacaggacgaaggagaagtgacagagactgcagatacagaggattctgtagacgaggaggaaaaagcagatgcggaaacaaacgatgaacctgccatggaaaacagcggacaggtaagtgaaacgaccgatgatggaattacctctgacaataacgggtctgtttcatcttatgagagtctgccagcaggcgtaccatataccagtggattcagtactgcctccggtgtagcatcaattgtagcaccgggtggaggagatgaagaatccagagttctttacgataacggagatgggacctattctgatgattatgggagccgatacagttatcagggagatggaaactgggcagatgccaatggcaattcatatcgtacctggaatgacgaagattattattccggaaaccaactggaacagcatgaacttcagggcagtaacggtaccgttactgtaaaagaaacaacaaacggagattattactattgtgacgcagatggggtcggatacacagacaatggtgatggcacctggacggatgagaatgggaacatctatacagaataaaagaaagcgtttttcgaaaccaaaaggaatcgaaaaacgcttttttcatatatgacatataaaaaatgggatcataaacgatgacacattattggcgaatatctaccagtccctttttcagtatatattcagagaactcatacgaagctccgtccccagtcatattcagatacagatttttgaggtcgctttcatttacgatccaggccatgttcagctgcacactttcgcctggctttatagaggaaatgtagtttccaccgttgccataattttcagagacgctataatataccattccccctgtctttgccacgccggcccagctaatgtagtcatagccatcgccggcctgttctgttggaatgtaaagctgtacttttccattttccttagtcagggtcagtaaagcaccaagataaagcatatggtcgatttcctcatttgaatgattggtataggtaactgtaacatagaccagcttctggttcacttcctccgactttacaatttcatccagggaatcgattccgtcgccagacttcacataattcaatgtgtttgtagatagctttccatcagcatcaatggcttccgcccattcttgcggtattttgtccggatcgagaagctgaagatcatcagaaatttgaacagaatctacctttgcggaaatcgttttttccagatattcaccatttgtgttttcaccaatcacatccagatcaaaggtgtcaccaatttggtaaataggcagttttttctcatttacagaagtacttatttcatcattatcagcttctgtcttttcagatatcatctctccgctccatgtaggcaatccggcggtctttaccatagtcgtgtttccctcgatcaccagattctctgcaacttttatggcttcatcctttggcacatcatctccgatgtagatcataagcacacgatataaatccgggcagacaagataaattctctggttaagagccccgctttcggtaatgctattatatttgagatatatcccctggtatttcccaaatgtacgctcttcactatcaataacattctgatcctgtactacctgtcccagatcatttttatccaacaggacaaatgaaaaactgaacccgccagtcaggtcatgctcaggatattggagatggtactcgtcaatccagctcatgccctccggaacatatttagcagacagatctacctctgggacctcatctggaagcgcggttttctttactgcatcaccagcatcaattttgactgaaacaccataagaaccctgtttttccaaaaaccagtgatacagatttactcctgcatatactgccgtggaaactgccagtgcacacacagctgccactgcagcaactttcggagctgtccatcgttttcttcttcgcagattcgacactttattattcgccagctgctttgccacctcattttgaatcatattatggataaaatccggtgtttcgggaatatcgtttttcatatcttctaatctcatattgacacctcctgtaattcctgccttaattttcctcttgcccttgcaagtctcttttgaacggcaccctccgatatttcaaggatctgggcaatttcttttacactgaaatcttctatgtagtatagaataacgggtaaacgcagttcctcttttaaggactttacggctgtatacaattcactgtaattctttgttttttctgattccggttcctgtctgtcagccagattttccaatgggataaatttactggatttacgcacaaggctgtaacattcgttgattaagatacggattaaccaggttcgggcatagttatcgttttttaatgtaccgacgttggaaaaagccttcacaattgtttcctgaatagcatcagcacagtcatggtcattaaataaaattgtttttgcagttgagtataattgtctttctgaatccaggatcagagatccaagttgttcctttgtcatttaaacaccacctctttttttgccagccagcattttctttacatctattagacgtgcagaaatcaaaaatatccctaataatttattctttttcttataaatggacaagttcgtggttttgcacaaaaaaagatgtctactttcgatagtattccataacgaaagaaataaaacaagcatttgcaaaaggatatttttaaaattagatttgttcatgggtgttatttgtgattactttcatgctaatgtgtattatcatattagcatgaaaaaatatatggttcagtctgaaagattagaataagcttctcatggtgtgtatgtattaccggatacgtgaacagatgcgatgtaccttttgcatttatgttgtagccaagctgtattttttcatgaaactgcattgttttttcatgatttaacagacagagagcctttgaaatatgtcataatagtaagaactggatataatccaagtcgcttgcagaaaaacggttttcaagtgtatacagtaaaaaaagaaaagctcaccagcgacaaattcagtgtttttcaagggcttgcaaagaatttagcgtaaggtccaggtaagtaatagcattggttatgtgttgaaaatgtctgaaaaaatgatgataatagcaatataaatattaaaataaaaaataatataaaaattgtttcactatagagaaaaacatagtataatacaatcataagaagttagaaaggggtgcactgccatgctgagaaagttgaattgttttttaaacatcgttatcggttcattcataggagttttcattgggttcggaatttataagttttggcattttaaaacctatccaaatctatatgtcatgcaatctgcaccgtggtacacagagttactgttggatggtgccttggtggctgttgtggtggtcgtatgtattatcctaaaactgattatttggagaaagttaaagttataaatttctatttacctgattcacgaacagtttaataacaaatttacatagtattttatcccaatggttaatgtgctatttttatacaacaaaaagagaaacgaaatgtcacataaattaaaagctaaagggaaaacggcttatccgttttcagaattggcggatccgtctgctaataagtggtttacaaatcaaaaaacgtggtaagagaactttcataattctgttcaattttgtctatgttttcaagaatcctgttcatgtacaaatgcaactaaattagagtataataagggaaatcgttgaaacattataaatattgttgccgctgttcttatatctactggattatttacatttgtacatggtggtgcttttgaggcaggaatacttcctgtactaaatgttataacaatgagtcttttcgtgacggcagttttggaatacacggaatccttagttgctccgattgtaatccattttttatggaatggagtatcgttagcagaagaatatccgcttgactgtttggatttgtaatggcaaaaaaagaaaagggataaaaatctataatttgagacacactgtgtcctgaattgagctggtcacattatcgtgtcttgatgcgtataaatgatgaaaaggcaagaacaaatacaatgtagacttgggatataaaaaactatactatagaaaaagcgttagaggtggcatcaggaatgaaaaataaaattttggtgatagaagatgaccgcgcaatttcagaattgctgtgcatgaacctggaggcagcagggtatgagactgtggcagcgtatgatggggaagaagcccagaggctgctcttatggcaggaggacgcggacctggcagtggtggatatcatgctgccgggaaaagacgggtttgcactgatggaggattttaaaaagaaggagcttccggtgctctacctgactgcaaaggatgatgtggcttccaaggtgaagggattaaagctgggtgcggaagattatatggtaaaaccttttgagatgctggaacttctggtacgcattgagaaggtgctggagaggacgggacgggccaagaaagtcttaacggttcggaacatcctggtggacatgcaaagccatcaggtctacaaagacgggcttccggtaagcctaaagccaatggaatatgacctctttgtgatgctcctgcaaaataagaacattgcgcttggaagggaagaactgttaaaacgggtctggggagaaaactacctgggggaaagcaggacggtggatgtccatatcggacagctcagaaaaaagctggaactttatgacgagatcaggacgatcccgaaacttggataccgtctggaggaatagggatgaagctgtggaaacgaacggtacttcttatgctggtaacgctattatgtgccctgatcccagtgggaacgctaagtctttatatcacaggaaaacgaagcctcaataatgctgcagagacctacggaagacagctggaaaatggcaaggtactcctggaacaattttgggataatagcaaatatgggcagatgtccgagactggaaagcgggcttatgtgggctttcagttccagcgatgctgtggggaaggcatggccctgatcgaccgaaaaagcaatgccgtcattgaaaacctgacagattataaagtggtggggctcgaaaacttaggcttaaaggatgaaggagatccgtatgcctacaagatacagaaactgggacagaaatacctccttctccaactggaatcattatccagaccggaaggatacgaagtcctctctgtccgggaagttacagggctttttgcagagcttagacagaccgctgtctggtttttgggaatttatctggctgtgttcctgatcgccggcctttttatttatatgatgatgcgaagaactgtggaacagatggagaagctacaggaagtggcagagaaacaggagctgctcatgggggcactttcccatgaaatgcgtaccccgttaacgtccattatcgggtattcggataccctgcgccatgtaaagctgaaagacgaacagaaagaccgggcactggaacatatcaacagggagggaaaacgcctggaggctctttctgggaagatgctgcagatgctggggctttatcagaaccatgccatacagatggaaatgaccacggcaggtgaccttttaaaccatgtcatagacatggaaaaagaacaggcagaaaagaaagcggtgcacctcaagatggaatgtgaagccttttccatgaaaatggatccggccttgatggaaagccttctgataaacctgatcgacaatgccctaaaggctacggatgccagtggaagcatttgggtaaaggcttatgagaaagctggaaaaaagatctttgaggtgtcagataccggaatggggatcccggaggaagaactgggaaagatcacagatgcattctatatggtggacaaatcacgaagccgaaaagaaggcggatccggacttgggctggcactctgtgtgaaggtggctgaaatccatggcggatgcttgaaaatcgaaagcagacagagagaggggaccacggtaagagccatcttctgatttacaatttgtttacatcttgatgaatacatcggcgaagcaatatggtactcttttctcataagaagagggtaccttttttaataccgaaaggaaaggatggaaaaaggatgaagaaaataaaaatgtttatgggagccgttctgtgtatgaatcttttgacattatccggatgtgaccatgttgtccagtctgctgttgtggaagaaaaggatcagacagaacagaaaaaagaagagaaaaaggagacagttcagaaaaccgttgccgaacaggtacaggcaccggaaacataccagacaacgatccaggcagatctaagatcagcggaccgggaggataaagaaaccccgatgaattttaccctgacagcagatgcatcggtaaaagtgccgtatgtagatgcaatctgtttaaaaaaagtaaaaagagtggcgattcctgaagaagaacagaataaaataaaagacacattcggaaaaggacagcccatgcaggaagagaagaatgagaacgaacaggcggggacatatacagtagatggactgacctatcggtattcttatacacagagtgagcaggtatcggatgtggaggaacttggatttcagatagcgaagtttagctttgacgattgtggggacatgacccaggcatcaagtgagaaaaaagaaagggaagaacgctttcaaaattatataaaggcaggaagcgggaaagtgtctgaaaaggaagcgaaggagaaggtttcaggtcttgtgtccggagactgggagatatttgaaagttcctcaaaagcacttactgaaggaagcactaccctggaaaaagatgacttcatttttgaacggatgatagacggggttccggttaattatgtgagggaaacctctttgcctgttaatgagcaggctcttgaatgggaaaacgaagatggaacacttcatgaaggacagtctgaaggatgggaaaatgaagtattgacgatggacttttgcagtgggacacttcagagttttctgcacagaaatcccatagaagcatcgaatgcttccgatgagaggctgttcttacttccttttgatgaggtcaaggatatctttgaaaaaacgatcactttgcaggtcatgacagaagacaggaatcggatgatatctgtcgatggaggaagccactaccgttatccgtccattgatgcacagagtgcggagataaccataacaaaggtacagctgggttatatgtgcatgccagacagtgaaggcagcgataccgaagcagtcctgatcccggtgtgggatttttatggaacctggacatccaaagagccagagtatgagtacggaaatggggaggatggactggtcatgggagatgtgataatggatgatgcaggtgttccacttcttacgatcgatgcacgggatggaagcgtaatacaaaggattcaggctggatgggcggcttctatgggctccaaggatataaaatagagtgtgaatttcaatttttaattaatgatgacagaaagacctggattttcaggtctttctgctttacaggaaaaagaaaaatacgttatacttttcctatagaaaaaggttggaggaatatgtatggcagaaaaaatggcagagcagatcgcagagattttaaaagaatctgattatcatacggtagagaaggcactggcagatttccgcagaccgatggatggggaattcaggaatcttctggtggatattattgtggaacgatggatcgatacgcctaaagacgtaccgttttcctatgcccgcagcatttggaatcggaaagatataaatagagaagagtatcaggcattgctggaggaaatccgaagctatcccatcgcaccgatcaacaaggcaaagatatcggattttttatgggttgtggaaaatgatttctcaaatgctaaaatagcagaaacggcttattgcgaacacttgaagaacaccggtgcatttgcagatcatatcatggctataaaccggatcttgtttatctctaaaaaaatgcgaagcaaggaaatcaatgaagtggtgcgaaagaatctgctgataaaagtattagaagagtatgataacagcagccatgcaaaaattggatatttgataaaaactgccatggaggaaaaagtggatacaggatatctgatcccttatgtggaaaatatcttgaaaacctacgatgataatagctgcgatgcaccgctcattggtaagttttgtgatctgttggaagaactctattgcagaaaaaataactggcagaagaaaaagtgtattactgaacctaaactgattgcgatacgaagacgtaagattcaggctgtccggatggaggctgaatatgccgggggctcttccaaaggaaatttaatgagaaagattcactatttgaaagaggttattcagttgttaaagaccatacagggtacggaagaagaaagaaaggcactgttgcaggaaatagcacagatagaagaagcttctctttcggagatgatggtatggagtgataaacaggatgccagtggcattgtaaaagaactgttccgtcaactggaggatcttgataaggaagaagcactgtgttattttgcttcatttcttccgattccggaaagagaaagggtaaaggatcaagtattaaataggactgggatcctgcacacgatatttccagcggcaatccttggaaaaggaggaaaattaattgctaaaagcaggcctgtgaaaaagcacgatggaacaattgatgaaggagctcttaaggataatatggagcggacagcagccatggagatggattattttgcacagatcctggtgagaaatacgtttgaatatattcgttccagatttgtgatcgaagagagtgatgtaaaaaagattgtagatgtaagttgtgcgattccggaggggagaaaagaatcgtataccaagggtcttatgtttggcttttcaggagattttttgacggcgctaagtatcctgattccacagatagaaaatgcagtaagatatctggcagtggaatgtggagaacctgtttacaacatgaatgaagaagggattgaagaagtaaaaccaatgcacgctgtcttagaattggaaggagtaaaagaaagcctggatgaagaccttatatttgctttaaatacgattttctgttcaaaatttggatttaacatgcgcaacaatgtggcacatggaatgctggatgatcaggcattccagagcttcaaagctttgtatatctggtggtttgcactgaaattttgctatctattctgcggaaaattacaggaggagaatagaagtaaaataaataaaaagctgaaacagctgatggagaagaaagataatatggatgagaattaatataaaatggttggacggatggtatggtttccttaaaaagtgttcggaagtacctggcaagcatagcgtttggatatcaaaacgcactttggggacggcctcaacccccggaatgtgtagcactgagagtaaatctataaatataatatgaattataaaaatactccaacttattagtagtcagagtgtttttcataagcatatattttttctataaaaaaaagtagagagaaagtattttggtagttacggatttaagaaaaaccaaaattcatgtccctggcatacaatatatcgctccagccattcattaaaaggaaggttaaaacgatcggtgtcaggagcgggataacataaataatcgtctctaccttctgatacagcctgcaaattcatggttatatcacctatatcttgcagacaaagaatggggagatgatatgtgaattctggatcagataaaataggtgtattattccaaaattctttttgattaagagcttcttttaaagagtagatggtacagctgactagagaactaccctcttctccacaaaatagctccattccatttgaacaagataaaaaggctttatacgaagcgggaagtttcatgttagggaaatattcttcaaataactgaaattcttcagaggatacaggtgagtaaaatttacgagtatctctattttgaagttttcagtataaaattatataaatatataataaaatttatttataagcccccaaaaaggacaataagaatcttcagacagaaatactacgtaattgtcgaaaaaaatattcaaattgagtatctatatttttcagtaagaagagttcaatagtaagttcaaatatccttgcagatagcaatatcatcagaaaaagtgtataattacaaggaaagaattgatgaaaaaatttatctatgcagaaaaatgttgatggattgagaggtgataagtgtgagaattgataagatttgtaaaacgtgtggatttgactccaatggtgtgtgtggcatgtataccacatgcaaggaaggcgaagagtgcgatgactgggaagcttctttggagtattataccgagattacgaaaaaagcaccttggtatattaagaaaccttatgatcaatgtaaaataagttatgaaaaatttctggatcttttacaacaggatgaacagggagtcggtgtagaaataaatatttatgatgcgattgaaaaagtatatgaattaaattcggtagaactagcaggggtgttagatgtatctatgggagtgttgggatatgccagcactcaaagaacgataccaaagagaaaaagacaattttcaagcaggctacatattccggaaagcttctttgatgagtttttatctacacaactggatgcattaaagaaatgtagagaagaatttcgtgattgttatggggacgagctgatagaaaaatttaagcaaaatggttatgctgcaatggaagcaaagatagaaaaacaaaatgcagtcgataaaataaaaaatgaaaagtatagggaagaaaaccagaacagatatcagtataaggagaagacaaaaatgtaccatgatctatctgatgattacaaatccagggactatgtgattgcgataaccttaaaagaaggcgattattatggaaatatattctatgaatacagttctggaggatatggcttgtctgtggacataatggaagatattttgcaatttattgaaaatctggattgtgaagaaatcaatgagttaaacgaggaaggtctcttaaataataatatagccttgcaagcagacataaatggcaaggatattcattttgaactgagaaatgatgcaggagaaaagctcgaaaagacaatcccggaagatgaattgcaaaaatacattgttggttatgaaatgatccggtgcgatggacgtggaatgaaaaaggaacgcagaaaatgtggttcctgcgaaaattttacaccgatagaaggctgtgcaaaaggaaactgttctgttagaggtgatatcattcagagaagcagaattatatgttcccatgattatgtgttgaaagcagataaagtattatgttaaaatcgtctcgtactatcaatggaaaagatgattgtatagatttactataggaattagaatatataaattgtaaggatatattgtgtgatattgcactttatatgataaaaacaagataaaaacgcaatgcatatttttaagatatgctagagctggtaggtagcccagccgtcctatgtaaatagggtaagtaacctgcccctccgggttgtccattctttgttcaattcattttaggagggatttttatggacaaaacaaatggaaaactgacggtatattttgaagaaccattttgggtaggcgtattcgagcgtattgaggatggtaaattatctgtagcgaaggtaatatttggtgcagaaccaaaagattacgaagtgcaggaatatattcaacaatactatttcagtttgaaattcagtccggctgttgaaactgttgtaaaggatataaaaagaaatccgaaacggatgcatcgagaagtaaaaaagcagacaatagggacaggtattggcacaaaatcgcagcaagcattgaagttacagcaggaacataacaaacaggagcgtaaagagagaaatcgcaagaaaaaagaggcaaaagaacagcgaatgtttgagttgaaacagcaaaagaaaagagaaaagcataaggggcattaaaagcctcttgggctttaactcaaatcggaattgaccgagcgcattgggcgagagatacttcttgtttgaatggcaagaagatggaattgagagtttagaaaattggaattcaaggagcatatagatgaaattagcagatttagcaacaggttctgattggatagcgtggattgtctttgtaatatttgctgcactttctataactttactttctggacacggaagctggtttatttctggatataatacagctacaaaagaagaaaaggaaaaatatgatgaaaagaagttatgcagaacaatgggaattggaatgtctattatagcaattcttgcattaattatgggcgtgcttgaaaatattttgtctgcattttttgtatatattgcattgggaattattttgattgatgtcgcggtaattatcattttgggaaacacgctatgcagaaagtaataacttccagttagttgagatgttgcaaaatttggaatcaggagagaataagaatgattaacaatttgatgtacattgaattaaaaacgggatattctgatgatggtccggcatggattggatatgtcaaaacttcaaaaagtaagaaaacaatctattttaatgaccatgcctttcagaaaaatatcggtaactatgcaaattatatagatattgagaatggtgataaatattggatttccggactgaaaaaggaagagagcaatcgtcattgggcaggacatggaaagattatgattgatcgtagagctgttaatgaataccttttcctgattggtgaaaaggaattgccattaaatctgtttgaagtagttgatattgaagatagatttccggttaaaagagtaaaagaattattgaatgaaaagaaatagcaatgccagcagtcttgcaatattgagaataaaaaaatgtgacattcttacatatgcgtgctaatatgaatatagaaaaagagtactactgatagacggttagtccacatacttattgaaaataaccgttcacgctggggcggttatttttgtgtcttgttattaactttgccgaatacctttgaggaacgagggagtgagatatatggagcaattattgattgttgaagatgatattggtttgaatcaaggtttatgcaaagcactgaaagtagatgatcggaaggttatttcctgcaaagacctgaaaacggcgaaggagcagctgctttgcggcggtgtatccctgatcctgttagatatcaatctgccggatggcagtgggcttgaattgctacgggaggtcaaggaaaccacacccgggattcctgttattctgctgactgccaatgataccgatctggacatcgtggacggactggagaggggcgctgatgattacattaccaagcccttttctctttcggttttgcgggcaagggtgaatacccaactgcgaaagcaaacgtcaagccataaaaatgcaccgatccatattgatctttttcactttgactttgaagcaatgaccttttatgtgggagattcaaaagtggaattgagtaaaacagaacaaaaattactgcgtctgcttgttgaaaatcgtggtcgaaccatgacccgtggagaccttgtagacaggatctggacagatggtgctgaatatgtggatgaaaatgctttgtctgttacgatcaagcgtctgagggataagcttggggcacagaaatacattaaaaccgtctatggaatcggttatagctgggtgacaaaagatgaataaaaccggcattgtgatcatactgctgtgttctctggcggcggcagctgttgtattatgggagcggagaaaggccagaaaaacgatggaagaaatcgaaaggatgctggacgctgccatgaccggttctttttctgaaatcacttttgatgaaagccagctgtctgctttggaaacaaagtttgcacactatctttctgccgcagaagcatcttctcgaaatatggcacaggaaaaagacaaaatcaaatccttgattgcggacatttcgcaccagacgaaaacgccgattgcaaacctgctgttatacagcgagcttttgatggaggaaactcttcctgcatcggcaaaggaaaacgtggaggcactgtacaaacaatcggaaaagctacgatttctgattgattctctcgtaaaactttccagactggaaaatgggatcatttcactttcccctcagcaagcatcacttcagccgctgcttgaaagcgtagtagaacaatatgccgccaaggcttctggaaaaggattatccatatatctgtacgatacagatatttccgctacatttgacttcaaatggacagcggaagcactggctaatattgtagacaatgccatcaaatatacggagcatggaacaatcacgatttctaccgtaaattacgaaatgtttacaaggatcgatatatcggataccggttcaggtatcccggaaaacgagcaggcaaagatattttcccgtttttatcgttcaaatgctgttcaggaacaagaaggggttggcatcggcttataccttgcccgacagattatatccggtgagagcggttatatcaaggttgcttccgttccgggaaaaggaagtacgttttccatatttctgccgaaataacaacaattctatcaaaactgttagatttcattttctgccggaaagaatgtggaaagaatcctatgcgataatctgtatgtatcaaaggatcatttcctttcatacatacagattttttcatggaggtactcgtttatggaggttttacaggcaaaagacctgaaaaagatttatggctccggtaataacgcagttcatgcgttggatggagttgatttaagtgtgaagaagggagagtttgttgcaattgtcggcacatccgaatccggaaaatccacgctgttgcatatgctgggcgggctggatcgccctacaagcggcacggtcatagtggacggacaggatattttctccctgaaggaggaagcgctgaccatctttcgccgcaggaaaatcggctttgtatttcagagctacaatcttgttccggtgctgaatgtatatgaaaatatcattctacccactgaactggatggcggaaaggtaaacaaggcttttgtgcagcagatcgtgcagacgcttggactgagcgaccgtctggatgccctgcccaatcagctctcaggcggtcaacagcagcgagtagccattgcccgtgcgctggcggcagcacccgctatcattctggcagatgaacccaccggcaatctggattccaaaaccagccaggatgtattgagccttttgaaagtcaccagtcaaaagttcgcccagacaatcgtaatgatcactcacaacgaagaaattgcgcagatggcagaccgcattatccgtatcgaagatggtcggatcgtctcccagaactaacgggaggtggctacgatgaatgtcaaaaacagaaaatgtattcgaaagctcagcttaaaatctctttatgcgaaccgtcgccgcaatctgatcgctatttttgccattgcgctgaccacgctgctatttacctccatgttcaccattgtcttgtcgttgaacgccagctatgaaacctaccagtttcggcaggtaggcggctatgcgcatggcacctttaaggatgtttcccccgagcaggcggaacgcatcgctgcccacccaaaggtaaaggctacgggggcacggaaggtaatcggtatcactgcggagggggtctttgccaaaataccggcagagatcagctacatggatgccaactgcactaaatggagctatgccacccctactaccggacggatgcccgaaagcggcaaagaggtagccatggatacggcagcgttgcagctgcttggcgtaacgccggagctgggcgccgaggtcacggtttcctattccattacggacaaggatcaaaccgcctttactgtaacagatacctttacgctggtgggctattgggactatgatgaactaatgcctgttcattacatcaacatcagccgtgattacgcagatgacatcgaagcgcaggcagtgaaaacaggtttacagcctttccgcaccgatttgaatgtcatgctgacctccggcacaaacattcaagggcagatggagcaggtggataccgatcttggctacacatgggacagctatactgatcccaacagcgtccggatcggcgtcaactggggatatacctcatcccagctggagtcgcagctcgatccagagctgatgatcgccatagcagcttttttgctgctggtgattttcacggggtatcttatcatctataacatttttcagatctctgttgcgggggatatccggttttacggacttctgaaaaccattggcacaacgccccggcagctcaaacgcatcattcgccagcaggcacttctgctttgtctgatcggcattccggcggggctgctgctgggctacggcatcggcgctgttttgatgcctgttgtcttgcactccatccagttgaatacaggcatcaccaccatcagcacttcgcctgtgatcttccttggttctatgctgttcgccttgttgacggtgcttttgtcctgttccaagcccggaaaaatggcagccaaggtctctccggtggaggctaccaaatatacggatgtgatgcagaccaagaaaaaacggcgcagcatccgaggagcaaagctccatcagatggcctttgccaatctgggacgaaacaagaaaaagacggtactggtggtgttgtctctggcactgtcggtgacactgttcaatgcgctgtgtgcctttgtgggcggcttcagcatggagaagtatgtatcctccatgacctgcgccgattttatcgtcagcactcccgactattttcgttataacccagcagatgaattcatcacgccagaacagatcggagagatcgcagcaaacacaaaggccagtctttccggcacgggatatgctgtgcgaaaacccgcatatctgtggatgacggaggatgctctgcggcaggactatgcaaggtacgaaagcgccgagcagttggacacccatatgagccgcatggagcaccggggcaatatggtgatgggagataccagaatcgaggctctggataacagtctgtttgacaagctgcaagtgctcgacggagatatttctcctatgctggagccggacaataacgccattgccattgcggtttccttagatgactacggtaatctgctcaatcctgaatactaccccaaggtgggagacacgatcacggctacctatgcggatgatgtgaaatatatcgacagccgcactggagaactccgcaccgaagatacaccggaggagtaccgtcagaaaaaactgtatggagccagagatgtagagtacacggtctgcgccttggtagaacttccgaattccatgagttatcgttatagcggcgttggctatgatgcagttttgtctgtggacaccgcacagagggacagcggtggtgcagccattccgatgctctacctgttcgacacagcggacgaagttgacgaggccgaagcagagcaatatctgtcaaagctcacggccggtgagttttcgcccttgatgtatgaaagcaaagccacggttcgctctgagtttgctcagttccggcagatgttccttctgatcggtggtatcctttgtgctatcattgggctggtgggactcttaaatttcttcaacgccatgatgaccggtattctttcccgccgccgggaatttgctgtgcttcaggctgtaggaatgacgccccgacagctcaaaaccatgctgatctacgaggggttgttttacgcaatgtcttccgtatcggtggcctttgtgctttcactggcggtgggacctcttgcggggaaaatgctgggcagtatgttctggttctttgagtatcggttcaccgttctgcctgtcctgctgacaattccggtatttcttctgcttgggtggctgattccttgcatgatgtatgataacgcagcgaaatgcagcattgtagatcagttaagggatgctcaataattgttaagccccaaatagccctctgtcaatgaaaaggctgagggctggaattcaaataataatcaaagtgaccattacactggccagcggcaagaaacaggtcatttccgttactgtgcaaaaaacaacagtaagaacaacaaagatcaccggactgaaatcaagcgtgactgttgcaaagaataaaaaaacttacgctgaaaccggtcatcagcccgatcacttcccaggagaaagttacctacagttcttcaaataagaagatcgcaacggtaagttccagtggtgtgatcaccggaaagaaaaagggaacagcctatatcacagtgaaatctggaaagatccgcaaaaaagtaaaacttaaatgaaaaactaaattccagttgtagactatcgttgtaattctgcaggattaaattcggctttgcaccttaacaaattcatatatttgcgttataatgagcctataagcctccagttttgatgttttttcacattctaaacgggcatctgaaaatagtatgcgagactaaattccacatgccttgtgtgtaagactaaattctggtgcagtgaaatctgcctgtgcttaaactattttatttcaacagatttggactaagcattacgtcatcaggtgcgactgccgttaaccctaatgctttgtgaagtttttggtccaagagtaaaagagatagttcatatggactgtgtccattgagactgtctcttttttcgctgtttatgtgattcatcataagcatgattttttcatcatctaagtcagcgaatgagctgcctttgggacggatgtaacgtatatactcatgattcttttcacaggctcctttttgccagaaacagtaagaatcacagtaaaaaatagttgtacttttacttccgtcacagaattcctccatctcttttcgggctgagaattcagaacctccatctgtgaggattaccggaaaaagctttttgaatgcctcttgttccaaaactgtttccagccatacaaagacctccaggacacattcctgatcctgatattccaaaagaaacatgagcataagattgcagttgcggaacgtaaaggttaagatggctttgctttcgcctttcttaccttccacgcagtccatttccacaacattgatatctggatgttcctttatataattctgaaaatcttcgtagttatgaccttgacggtaaaaacagtctttcgcactggcctgagtaggtttcctgcgtttcttataacgtacagttcttcttaaatcactgtttcgtacctcaaagacacaattactgatgtacgagtagagtgttcttctggaacagcctaattcctcagcatgggtagcatagatatgacctatagactggtgtttttccttaatcaaaggaaccagtaggtcattcatggcctgaatactttcaggagtttggttgatgccaactctgcaatcaactaatacgcttcgatatacatcatgtgcatattttgatgaataaaattttcttggcataagacaattcgttttttttacacaaccattgcagacatacggtggtttcttaagtttttcgcattcagcagtttcataacccgggcatatattgatacatcgcatatcaggttttctacagagtttacaaacaataccacactgttcatcacaaaggcaaactattttacaagttttgcgatgaatacatggtgggtttgtatatcctgcatcgggacgttcttttgtatgtgcatgaagtcttacttcttttgatatagtagagggatcttttccgatggttcttccaatttcagcgaaacttttattttcggtaagccccttctcgatatcaacacgttgctcaaatgttaaatgtttctgattgcctttattgttcattattatctccgatctgcacaggcaggcaatcagctgcaagtacattataaagagttatgttattggcaatcaatagagttaagatatgtgcagaggtaatttctacctatatagaatttactcttacattttaagtttcaaaattaatacattaggagaggaggcatttcttgataagttgattgagctgctggatgtgtaactttcttttgaagataataaatgcactggattgattgcagtattttatggaatcgatataaatatcagcagcccatcacagcagtatataagcagtaaatcttgaaaaaggtttgctgcttttttgcttaaaggggaatctgatccatatacttccagcatagacttgtaattacctgggtctgtttgggtaaagttgattttatatagtgaacatttaacttcgtttggaaaagttgtgttttaacagggtgagatgctgacaatagagcagtttcgtagtgaagagatgcagaatttatatcagcaatatctggtatccggaccggcagaatacgtgaaggatctgttaaaaaatatggaaataaaaaatccagaagagaaagcagttaaattttatgcaaatatgtttttctattatagtgtatatgatggggcagcagataaagcgaaagtaaaaggtcagtttgaacatatgctgaacaaaattgtagaagaaatgaaaattgcagaacaaaaaatatgagagccagacgcgtaagacacagagccgttaatactgatagttaagaaatattcaggattatcggttttttgtttacaatcattcgaaaggagactaaaaaatgggaaaaaagtaatattatgattcgtttagagaaaaaggaagaacatcagaaagtagaaaatctggtaagagaaagtttttggaatgtatattgtccaggatgccttgagcattatgtattgcatcagctccgaaatgatccggcatttgttccagaactggatcagagcaatggtaagtgcagctatgaaacagataagaatcttttggacgattatctgaagtggttttgtgaggaaaatgccatatgataaagaaaaagaatttatcgagttattgcggtaagtgaccttagtgcatcgaatgcaccatcgcatcagttatggaatcagctaagcagtctgtacaatgtatgtactctggtgtgtgcaatgatggtatgtataggcattcagggtaagaaaaacagactcctgcaggtaggcattaagatgcatattttttcgacagtgatagttgttttattgtccatagtatctctggttttgattattattgccggagcaaaggataaaagctctcgttcttatggcatttttgcagcaatcgctcttggtatgaattgcttgcgtcagcaggcggagatatgtctggatatccctagagtgattcaccggtagaaactattgaagcaattattgatgttgtgcagcttccggaaaatgaagaaaatatagtggaagaccaaccaacagaagcggttgactcggatgcagatgacaatgaaaaccaagaggatttttcagaagaaattgaagacgaggatactgaatccagtttagaaaatgaagattatcccggagaggatgtagttgaaattataaatctgcggggagaaacaactactgtttataagttagtggatggccgttacatggattgtaccaatactgtctatatttatgatggaaaagacacatggacagatacaaatggtgtggagtggaaccaggaagtgatatagttttgtcagttttgtcagagttttgtcagaatcaaaaaacaggttgctgaataggcataatctatattataatatatttatagctaagctcacttggaggtgataacatgccattattgaaagaagaagcttatactatagatgatatatatgctttaccagatggagaaagagcagaactgattgatggtcgtatgtatatgatggcaccaccaagccgaaagcatcagcgtatctcaacaagacttgtcagtattattgatcgttatattgaagaacataaaggaaaatgcgaggtctatgctgcaccatttgctgtttacctggatgaaagaagtaatacctatgtagagccagatatttctgtaatttgtgatccagataagcttgatgatagaggatgtaagggcgcacctgattggattattgagattgtgtcacctgcaagtaagaaaatggactacctgttgaagcttctgaaatatcgttccgcaggtgttaaggaatattggattgttgatcctgagaagaatcgtgttatagtatataattttaccggtgatgaaagtgttaatgattataccttacaggattttgttaaagtgggaatctatgaagattttgtgattgatttcggaagtatggaattatgagtgataatatgacaaaacgtgcaaaagaatatatgaatgcagatttcgtatacgaggattataaaaatctggcagaagcacagaaaatagcagacgtagaagatgtgacagcaatttcggaacgattaatcaaacagaatatggaagcatataaggagcttgctaaatgataattttgaataaaaaacatagggagatttgttcaagagaagttaccagagaaataccaaacagtgagactatatctgcaattaatgaagtacaacagatgaaacagaatccttctttaggaaaatcgtatacagatatagacaaaatgatgatagacttgacaatataaaaagctttattttcatcgaagggagcatatagaatggattggaatttaaagattacagatatggcaggtgctacaccagaacattcatcagttattgtcaattttgtggctgcggtcagatatcagttaaaaaacagcacttgttatgtttattccgataatgtacagtaccgttttaaagatgctgagggaaataataagatagtcattcctgatgcctctataaactgtcgcactaaatccaggagagggaatacatttacagatgccccacgctttgttatggaagttttatctccatcaaccgaaaaatatgatcgtacagaaaagatggaattatatgcgcaacaggagatagaggaatattggattgttgattggcgtacaaaaacaatagagatttatgaactggactatgatgagaatgatattcccaaatattatctctggaaaactattagcgaagaaaacaaggatgaattaagattggttcattttcccaatattaagataacctttgaagatctgtttgatgagattgactactaagatatagtatggaattgtaggaggtgagtgaatatgccattacttgaagaggaatatagaaaagaagagaagatcaatggtgtgatttatgatatgtcaccgtcaccaaattatcagcatgggattgtagatggtaatatttattccattataaaaagtggattaaaaggaacattgtgcttggctttcatggagaatctggattataaatatcatgcacaggagaataatgattatgtgataccagatgtgatgattatatgtgaccgtaagcatttgaaaggtggttcctatactggtacacccagatttattgtggaaactcttagtcctgcgactgcattgagagataagactgtcaaaaaggagctttaccagaatgcaggagttgaggaatactggatcatttcaccaagagagcgggctgtagaaatctactatctggaaaatggtaaatatgacttgaaatacagttacattcttcaggatgattcagaagaagaacattataatgcagatacagtggtgacattgaaagactttccgaaaatctccatgacattagcggagatgtttgagaacgtagaatgatcacaatttaatatgagcagtatgaaagccctcgggagttaatccaaacgaaaaggaaaatagttcttttgaattaattaagtgttataaagataatattttaattgggataaaattagataaagatggggactatttatatgttgcaaccatgcatgaagtacaagaatcaaaaatagtaagacgtttgcatagtggaaggattaaggaagttgttactgagtgtgaaagttactgttcacacaccactgtcccgcgaggtgttttggcatgaatatgccaaaatcccgagacatacaagccaaaattccattgccgcaggcaatctggaatgaattttggctacgttactgtgaacggagtgaacagtaacgtgtgaaaaaaacagcactgaaaacagaaaaaataatcctgacaaagaagaaattaaatagtatttctttttatagaaagtgaatatgataataacaagcataattatttttgaggtcagaaaaggttcctgacgcactctgaaaagagtacctgagatgatggatacaccgcccatccaaaaataattatgcttttattaaggatgtaagagactatcgtaataggtagtctcttttcttatgcaattttttaaaataatataataatacataaggaggttttacatgtcagattttaaaataaaagtgacggcagatcttgatacgtcataagtagaagcgaaactaatggctttgcaaaatagaaaaataacgatacaagccaatgcgatattgtggattttagaacttgtttcttatctttcggtactctcttggggaatatcctttcagcttgtggaaaagccggctgaaataaagctgattatcatacccgacgattttagaaatttcattgatggaataggttgttgtttcaagtaacatctgggcattgttaattcggattcccacaataaactgcattggtgtagaacctgtgtattttttgaagtttcggataaaccagctgacactcattccacgtgaggcagcataatcatctatgctaatattctggttataattttcactgaaaaaggtaactgcgttatccatctcgtgatccaggtattcatttttcgagatatgttccctggtcagttcccgatgaaagatgataagaagatgacggagcagaaggacaagcatgtcctcataattatcttggcaacgctgaagctcgatgataatacgcttgaaaatctgttcgtattccatagaggttccgacctgaaatacacgctctttatccgggaatccatattgccgtaggatattttttacattgttgcctgtaaaatgaatccagtatacttctgtcttatcttttccataatattcatatttctgaagttccttcggtctgtacagtacaatattaccggcggggacaatcgtttcgttatccacattgtcaaaatgaaaatgcccacaaccagcagtgatatagataatctgataatccaggcgtccccttggacggtaggttggtaactttggatggctggaaaggcggtaagtaccgcaacttcctacaaccagtgggcgacttttgtctttgaaatccatatgggagtggtttaaataaccggtattcatatacatatggtagcacctcttttcctttttttgttattgtatcatttagtgcatattttgtctaatccaattcatagacatgttttgcagattaggataagatatatatagcaaaacagagaagcgtaaacataaaagtaaaagacaaggtttgctgtggaaaaacaaagtgcaaaaaaatgtatatgtattaaaggagagttatttatgattgtaccacgttattatgaggatttaagcgtactgcatgaaaatacaatgccagccagagcctattttattccggcatccaaaagaatggataacctggtggagcacagggaagagtcagaccgaatgcagttattgaacggaacttggaagttccagtattttaacagtatctatgatgttcaggaacccttctttgagaaagattatgatacagaaaattttgatgagattcaggttccgagtgtatggcagatggcaggatatgatacacatcagtatacaaacatcaggtatccgttcccatttgatccaccgtatgtaccacaggatattccatgtggaacatatgcacatacctttgtttatcacaaagatgaaaatgcaccaaaagctttcttgaattttgaaggagtagacagttgcttttatgtatggatcaatggctcttatgtagggtatagccaggtttctcatatgaccagtgagtttgatatcaccgacctccttcgggacggagagaacagcatagcggttctggtcatgaagtggtgtgatggttcctatttggaagatcaggacaaattccgtatgagtggtattttccgggatgtgtacattttgaaacgcccaaaacaggcaatcagtgattatcatattaaaacaagaattgaggatatgcttgcgaaagtagaaattgaaatgaaattctactctcccttaaatgtaaaaatttcgattgaagatagaaacggagcagttgtagcactaggaagtattgctgaagaaggaacagctgtattagaaattgcaagtccggaactttggaatacagaaaatccatatctatataaactgattcttgaaacagagaatgaagtaattgtagatcacattgcattaagaaagatagagattaaagaccaggtcatttacctaaatggacagaagattaaattccgtggtgtcaatcgacatgattccgatccggttactggatttacaatcagtctggaacagctcacaaccgatcttacgttaatgaagcagcataattttaatgcgatccgttccagccactatccgaacgcaccatttttctatgaaatgtgtgacaagtatggattcatggtgatagatgaagcagatattgaagctcatggtccatttatgatctacagaaaagaagacaccgattacaatcggttcaaacgatggaatgagaagattgcagatgatccggtatgggaagaggcaatcgttgatcgcgtaaaacttatggtggaacgtgacaaaaaccgtttctgtattgttatgtggtcaatgggaaatgagagtgcttatggctgcaactttgaaaaagcactggaatggacaaagaattttgatccagaccgcatcacacaatatgagagtgcaagataccgtaattatgatgaaacatatgattacagcaatctggatgtgtacagccggatgtatccggcgctttccgaaattcaggaatatctggataaagatggaagcaaacccttccttttggtagagtactgtcacagtatgggaaacggacctggagattttgaagattacttccagatgattcaggataatgataaaatgtgcggcggctttgtctgggaatggtgtgaccatgcgattgctcatggaactgctgagaatggaaagactatatatgcttatgggggcgaccatggcgaagaaattcatgatggcaacttctgtatggatggattagtatatccggacagaacggtacatacaggacttttggaatacaagaatgtttatcgcccggcaagggttatttcctatgacaaagaaagcggagaactggtgcttcataactacatggattttgatgacttgaaagattatgtgaagatcagttatgaactgacgcaggacgggcttgtaatcagcaaaggtaaactcccagaagtttcagcagcaccacacagtgaaggaaaaataaaccttaaaatcaatgtgccagagagtggaaaatgttatttaaaatttatttaccatctgaaaaaggaattgccactgttggatgaagaccatatccttggatttgatgagatcgaagtaagccagaaggatgccaaatgccagttagcagaaaaatgggttgaaaaaacagtgacggattctgaattacaggtgagtgaagatgatacacagattcatatcaaaggccgtgaattcgcatatacaatcgaccgacggactgcactttttacagagatgaaatttgcaggtcgggaatatctgaaccacccgatggaattaaatatctggagggcaccaacagataatgatatgtacatcaagtctgaatggaagaaagcccattatgataaagcttatacaagagcttacacgacagaggtcgtgcagggaaagcatggtgtgaaaattacaagccatgcatccgttgtggcagagacagtacagaagattcttgatgtgacgatcacatggaaaatagaagctgctggaaagattgatgcagatattgcagtaacaaaagatgatgaatttccggacctgccaagatttggtgtgaggatgttcctggataaaaaactttcagctgcacgatactttggaatgggaccacaggaaagctattgtgacaaacatcaggctgcgagccacggtttgtatcatgcaaatgtagatgatttgcatgaggattatattcgcccacaggaaaatggaagccattatgattgtgaatatgtagagcttaacaacagccgatatggaattgtggtatctgcggaaaatgccttctcattcaatgcttcttattatacacaggaagaacttgagaagaaaacgcataattatgaactgacagaatcagatagtgtagtattttgcgttgactacgcattaaatggcattggttctaatagttgtggtccagttgtattggatcagtaccgatttgatgatgtattattccggttccagtttacgctgataccgtatgtaaagggataataaagtttcatgtaacccgtaaacaaggaaagagagtctgattgttatgtaaagtccggatatacagagcaatcagacaaaaacagagaaaaaaatataattagacatcatacggttagacatattgagattctaagtgcgatgaagatgaggagcaaagaaattcgatggaagaaaaaaagtatttgaaatggtataacaaaattggatatggatcaggtgatattgcaggtaatgtagtctatgccttcctgacatctttcatgatggtctatctgacggactcagtaggacttgctgcaggtgtcgtaggtaccctgattgccgtatcaaaactatttgatggttttacggatatattttttggatcaatgattgacaaaacacacagtaaaatgggaaaagcgaagccatggatgctatacggatacattggttgtgccattacgctggtctgctgctttgcaataccagtcagctttggaacaacggctaaatacgcatggttctttatctcttatacactgttaaatggtgtgttttatacagcaaacaatattgcttactcagcacttacgtcactgattacaaagaacagcaaagagcgtgtgcagatgggatcttaccgttttatttttgcattttcaacaagtcttctgattcaggcgattacagttggatttgtagataaatgtggtggagatgctgcggcatggagaacggttgctattatctatgcaatcattggtcttgtcataaatacgatttcagcactttctgttaaggaacttcctgaggaagaacttaacgaaggagaagtaaaggatgataatgaaaagtacggaatggtacaggcattcaagcttcttgttaaaaacaaatattacatgatgatttgtggaacatatattttacagcagttatatggtgccatgattggagctggcatttattacatgacatgggtactgaaaaataagaatttgtttggacaatttgcatgggcagtaaatattccactgatcattgccctgattttcacaccgacattagttggtaagtggaaaggtatgtataaactgaacttaagaggttatgtcttagcagtcatcggtagagcacttgttgttgttgcaggatatatgggcagtgttccgctgatgatggcgtttacagctcttgcagccttaggtcagggaccatggcagggagatatgaatgcagttatcgcatcctgctctgaatacacttatcttacacagggaaagagaattgacggaacgatgtactcttgtacttctcttggcgtaaaaatcggtggaggtattggaaccgctgttgttggatggatgcttgagttcagtggatatgtcggaacaaatgtaactcagccgcagtctgcacttgatatgatgcagtttatgtatctttggcttccgttaatctttgatgtattgattatgtttgtactttcaagaatgaatgtagaagatgcaaataaaaaactgaaagcagaaaaagaaattgctgcagatgaagtaacagatgcatcggacataaattagaattgacaggagaaagcgttgtctggtcattgctcgatgagacagtgcttttttctatatataaagtgattgaactgtattttgaaaataaaaaaggaccacttcatttttgtgaaatggccttaagaaaatattcagttttcacaaaatagtccttttagtatttatacatggtaaggatgctcaaaatattcagtgtagaatactaaaaggtcattcagatatttttttaggttgctcatttgcaattcctcctttccttatttacaagttgattataagataggtgtaaaaggattgcttgccaaatcgaaagaagatatagacaaatgttgcaaaggggagtatttcatgcagttaaaatatgttgacacaaaagaggagatcatagcaataaataggaagtcaaaacatattgaaccacatcttcataatgcactggagatcgtttgtgtaacaagtggagcattagaatttggtgtcggacaggaactataccatatggaaaaaggagatataggctttgtatttccagatgttattcatcactatcaggtactgacacccggtgtaaataaagcgacttatctgattgcatcgccatttacgatagccaaattttcagatatcatgcaatccatggctcctgaatacccaatcatcaaagtggaaaaggttgaaccggaggtatatagagttataaatgcaattttagagacagaacagtcggatattactgttgcacaggcatatcttcaaattgtgttggcacgctgcataggaaaattaaatttggtagaaaagagtaatgtggggagcaacgatcttatttaccagacagtttcctatatatcagcaaattttaagaagaagttttctctggaagagatggcaaaagatctgggggtgagcaaatatgttttatccagactcttttccaaaacattccatagaaactttaatcaatatcttaacgatgcaaggctgaactatgcatgccatcgtttggaaaatacgagtgattctattacaaacatttgtctggatagtggatttgaaagtcagagaacatttaaccgagtatttaaagaaagatataaaatatcaccgagtgactaccggagtacatgtctgaaagatatgttgtcataacatatagattaataaattcaataaaaatctgattatcagtctgaaataagtatctctgggtgttatttataatatggggtagtggttaattattatgtcatgtatgaatggggaagaaacaaacggagaactgcttcagaaaaagaagtagacaaactgtaaataaagaagttaagagaggctgttactttagaaactatttaaagaagtaacagaagtcggggaagcgttagaaaagatacaagaaacataaatcaatattgttcgttctattttcagtaacacatttcgcaatgcgaaaaataggttgctgaacagtcattgcctatattataatgaagctatagcaccctgttaaataatacatttgagaaagttcaactttcacgctctgttgagccagatcaatatacattatttacgaggagtgctacaggtacaataaaaaacggacaagaggcagactgatatggaaaataaactggaatatttaaaagaatatctgaagggacttggcagtgtagcagttgctttctcaagtggagtggattctacattcttattaaaagtagctcatgatgtgctgggtgataaggcgattgcgattacggctcaatcctgttctttcccgaaaagagagctgaatgaagcgaaggcattctgcgagaaagaggggattcagcatgtgatctgccagtctgaggaattggagattgaaggattttcaaagaatcctccgaacagatgttatttatgtaaaaaagaactgtttgagaagattggcgatattgcaaaaaagaatgggattgaatatattgcagagggatcaaatatggatgataacggcgattacagaccaggtctgatcgccgtaaaagaacttggagttaagagcccgctacgtgaggcgaagctgacgaaagcggagatcagagaatactcaaaggaactggggcttccgacttgggacaaacagtcatttgcctgtctgtcctccaggtttgtctatggagagaccatcagtgaggaaaagcttggaatggttgagaaagcagagcagcttttacttgactatggattccatcaggtacgtgtccgtattcacggttcacttgcaagaattgagactatgccggaggaatttccgaaacttctggaaaaaaatgtccgagaggatattgcaaagaaatttaaggagtatggattcacttatgtgaccatggatattctgggatatcgtatgggaagtatgaacgaaacacttggcgaaaatgacaaaacgactgcagatagcagccttaggggtaaaaacgaatgacagtaaaagagagaataacagcacttcgtgcacgcatgaaagagacaggaattgatgcatatctgatccctacagatgatttccatggttcggaatatgtaggtgaatatttcaaatgcagaaaatatatcacaggatttaccggttctgcaggcactgcggtgatcatgcaggatatggcaggattgtggacggatggacgttattttatccaggctgcagatcagctggagggaacaggaattactttatttaaaatgggtgaaccggaagttcccacagttcatgaatttctgaaaaaaaatctgacacagggaaggtgtctgggatttgacggacgtactgtcagtgcaaaagaggcagcagaattggagaaaatgctggatgaaaacggtgtgtctctcagtgttgatcacgatctggcaggcgatatatgggaaaaccgtccggtactttcctgtgaaccggttacagagctggatataaaatgggcaggagaatccagagctgataaatgcgcaagaatccgcaaagcaatggagaagaagggtgcagatttatttgtactgacttctctggatgatattgcctggctgttaaatatacgtgggggagatatccactgttgtccggtggttctttcttatcttgtaatgacaaaaacagagatcagactttttgcaaatgagaaagcctttcagacagatgtactggaagcgctggaaaaagatggtgtgaccctttttccctatgacagtatctatgagtatgtgaaaacatttaaaaaggacaaaaaagttcttctctgcaaaaagaaagtcaacagtcgtctggttagcaatattccggcagacactcggattttggatgaagaaaatcttacacttcttcccaaggcaacgaagaatcctgttgaggtggaaaatgaacgcattgcgcatatcagagacggagttgcagttacaaagttcatatactggttaaagaagaatgttggaaggagtccgatcacagaattaagtgcagcagaaaagctatatgaattccgttcggaacaggaggatttcatagataacagttttgatccgattattgcctatggaaagcatgctgctattgtacattattttgcaacacccgaaacggatattcctctggaaccatccggctttcttctggcagatacaggaggacattataaagagggaactactgatattacccgtactgttgtcatgggatcgactactgaggaagagaaaaagtacttcacagcagttttgcggggaactctgaatctgggagctgccagatttcttcatggctgtaccggtgtaaatctggatattctggcgagacagccgttgtgggaaatgggagaggattttaaacatggaaccggtcatggagtaggatatcttctgaatgtccatgaaggacccaatagcttccgatggaaaattgttccgggtggaaatgcagtgctggaggagggaatgattacctctgatgagccgggatattacagagaggatggatttggaatccgtcatgaaaatctgatggtctgtaaaaaagctgaaaaaacagagtatggtcagtttatgtgctttgaatttctgactatggtaccttttgatctggatggagtggtgccggaactgatgagtgtccgggaacgtaaccttctcaatgattaccatgcgcaggtatatgagaagatttctccgtatttgaacgaagaagaaaaagaatggctgaaagatgctacccgggcaatctgataaaaataaaaaaacattttacaaaatcaaaaagaggaacagccgtgatggacagctgttcctttttgatttattatctggcttgttttattcagaaacttttgcaaactggctgttatataaagtatggtaaaatccaccttttgcaatcagctcatcatgagtaccctgctcaatgatacttccgtctttcataacaagaatcagatctgcatttcggatggttgaaagcctgtgagctacgataaagcttgttcttccctccatcattcgttcaaacgcttcctgaatttgtaattctgttcgtgtatcaatactggaagtggcttcatccaggatcagcatcggaggcagacagagcataactcgtgtgatacacagcagctgtttctgtccctggcttaagctgtcttcgttgagcatggtgtccagtcctttaggaagcctccggataaattcccagctgtgggtaagcttggctgcttcgatgatttcagtatctgtagcttccggttttccaatcgagatattgtcgcggacagttccgtttttgatccatgtttcctgaagcaccataccatagctgcttctgagagaatggcgggtaatgtctctgattggtttgccgtcaacggaaatagatccggaatttacatcatagaatctcatcagaaggttgataaaggttgacttaccgcatccggtaggtcctacaatggcaacgcgcatacctggttttacatggagattaaagtcctcaatcagtttctttgattcatcataatggaagcacacattcttaatatctacttcaccctttacatctttcagtgtctcagaagcctctgcaacttccggttcctcctccagcagatcgaagattctgcctgcacaggcaagagcattctgaagttctgtaacaacggaactgatatcattgaatggtttcatatactggttggcataggagagaagtacggaaagtcctccgactgtcagtctgcctccagggataatgaatgcacccaccagtgcaacacaggcataaataatattattgacaaaacgggtggaagggtttgtcaggctgctgtaaaaaacagccttcagactgcattcctgtaattcttcgttaacctttgcaaagcgttcagaagatttttcctcatatccaaaagcctgaacaaccttctggtttccaatcatctcttcaatgagagcagtctgacgtcctctggcatcgctttgcttccggaacatctggaaggtatgggaagaaataaatttggccaccaaaaagcttacgggggtcaggacaatgaccatcaatgtaatccagaagtttttggagaacatgaagatcagtgttccgatgatcgttacgattccggaaaaaagctgggtaaatccaagcaacataccatcggatagaatatctgtatctgcgataatacggctgatgatatctccggtactgtgtccgtcaaggtaagagaggggaagtacctgaatgtgtcggatggctttggcacggatatcctttactgtctggtaggtcatgcgattatttatcacattcataagccacgtggcagcagaagagaggatgaccattacaaggatacgtgacaggtaataccacatcatttcgaagtttacctgatgttgggcaatgacctgatcaatggcatttccgaataggattgggacatacagctgaaggataacggaaactgctgccagtatgatactgaagatcagcagaaaacggtatcttccgatgaaacgcagtactttaaaaaaagtttcgctgcttttgcttttagcaggatcttttattgttgatctgctcatacagtcacctccttcattatattacctgcagatacagaggagtatctggctctttcttccggaaactgagagaagtagatttcccggtaagtatcacaggtacgcagcagttcagcatgagtacccttacctgccagagtaccgttatcaaggacaaggatcaagtctgcctgctgaatgctggaggaacgctgggataccagaaatgtagttactttccagtcaagtctgttgagagacttacgcagtgctgcatcagtggcaaagtccagggcactggcactgtcatccagaatcaggatttcaggtttttttaccagggcacgggcaatggtaagtctttgtttctggccgccggaaaggtttttaccgttctgttccagcataaaatcaagctgtcccggtttaccctctactacctcttttccctgtgctgtggtaagtgcctgccatagatcctcgtcagaggcatcttcccggccccatttcagattgtctcggatagagcctttgaaaagagctgccttctgtggaacaacgccgattctggagcggagatcacttctggtgtaattttcaatattctgaccatccagcagaacagttcctttgctggcatcatagaatctggagatcagatttaccagagtggtttttccgcttcctgtaccaccgataatacctacggtctgtcccttttttacagaaaaactgatatgggaaagactgggggcaccggctttgctgtactcaaaggttacgtcattgaatacgatggcattttcagaaagtgatgcatcagcagttgctgttgcaaggtccttcgatatctgagcagaatatgtggaggaagaggggtaatccatagtagatttcactttcaggatatctgccacacgtcctgcgcaggctgcagatttgttcagggtgatgatcagggaggcaagcttgatcagttccacgatcatctgagccatatagttataaagggcaacaacctgtccctgctgcataccgccaagatttacttctactcctgctttctggatcagaataacagtagcaatattgatcagtacataagtgaccggatttaacaaagcggaaagctttcctacaaagagatttaactttgtcagctcctgattgcgggtatcaaattctgcaactgcctctttttcgcggcagaatgcacggataacgcggacgcctgtaaggttttctctggtcagtccggttactgtgtccagttttccctgtacctttttaaacagaggaatactgaaaaacataatgacaaagacaaccagaaacagaaacgggatcgcaacagcaaaaaccagagcacatttaaaatcaatggtaaatgccatgaccatggatccaagtacgataaacggacttcgaagaagaagacgaagccccatgttcagtccgttctggacctgattgatatcgtcggtaagtcttgtgatcagggtgtctgttcccagggtatccagctctgtaaaagacagatgctgtacatggtcataaactgcctgtcttaatttagtggcaaagcccacgctggctttggctgcaaagaactgagctgtaatgctgctggcaagaccaagagctgccattaaaataagaataaaaaatctctggacaatgtatttgttgtcatggtttgcaatacctacatcaatgatctgtgcaatgacgataggcacgatcaggtcaaatacaacctccagaaatttaaaaaatggcgccaggatgctttcttttttgtagttttttaaataaactgccaatgaacgcattttaaaaattccttcctttcgtaaaaaatctttcctatattatttcttcctttttttgaaaaataatacattcaaaagtgtatcatttgagacttttttgtcaagaagaatgtgcaaaaacagctgaactttggagaaaattcagcttgacttcaaaaaaagatattattaaaatattccgtggcactatttgtgcactgacaattgataaattattattaccataatgaggaagagacagactatggagattattgagacatttggtcattatgtggaaaatctgacggataaaaagcctcagtcagcccgccggctgttaaaaaccggttgggaggtgcagaatctgaagttccgttacatgcaggacaagagactgatgcctgcagacaggcaccttgcaaatctgatgatggataccatgctgcgtccacttcagaaaccggaagattctgttattgtaagtatttttactccctgtgaaatgatgcaggaggtgggattacatccctataatgtagaaggattttcctgctatctttctgcaagcaaagcagagagggcatttttgcagcaggcagagaatcagggaattgcagagacactgtgcagttatcacaagacatttcttggtgcagcgcagaaaggacttctgccaaagcctaaatgtattgtttataccaacctgacctgcgatgctaacctgctcaccttccgtaccctggcagatttttaccaggtacctgtatttgccattgatgtaccatggaatcagaccacagagaatgtacagtatgtggcagatcagttaaaggatttaaaaatatttctggaaaaaaatacaggaaaaacaatctctgaggacagattaaaggaacgtcttgcctgcagtaagcggactctggagaattacaaaaaatatcagcagatgcgtgcagacagatatgtgccctctgatctggtcacacccttgtatgcaggaatgacaaacaatatccttctgggaacagcagaagaagagaagtatacacagatgcttcttgaagatattaagaaagcaccggcagcgaaagggaagcacatttactggatgcataccattccattctggtcggatgcagtgcgccaggagctttgcttcagtgagaaagcccagatcgtaggatgtgaacttgcagaaacctgtgagccggattttgatcctgagaacccctttgaagcaatggcagaaagaatggtatatcattcactgaacggaagtgcccttagaaggattgaagccggtatccgccatgcgaaacaggcaggagcagacggtgctgtgtggtttggacattggggatgtaaacatacgcttggtgcggcacagcttgcaaagaagaagttcgaggaagccggtctgccccttttgatcctggacggtgacgggtgtgatcgaagccatggaggagaaggacagacttccaccaggctgggagcttttctggaaatgctgggaggtgctgagaatgaataaaacttactatgtctgtaaatataccccaattgaacttctggaatctcttggcggggaatgtgagaactttaatcatatgccggagggatttgacctggccgatcaggtttcacatcccaatatctgcggttttggaaaaacacttctggaaggagtcatggaggggaaaatcaaggaacttgtcctggtgagctgctgtgatactatccggagtgtctatgacattctgcttgaaagcggcaagctggattttctctatattttggatgtgcttcactgtgacagtgcctgtagcagagagcgtatggctgtacagttaaaagggttggcgaaggcttatgcacagtacaaaggcacagagtttgatgccggaaaattccgggctgctttccatgcacaggagaaaatcacaaagtcccatattgcagtgcttggcgccagaatggggcaggaattatttgaaatgaccagcaaagctatgcctcttcctgtagagaatgatacctgcgtgcataaccgttctgtgggaaatatacttccaccggagggtgcttcttttgatgagctgatggactggtatgcaggtgagattctggggcagattccatgtatgcgtatgatggacccgacaggtcgtaagaagctttataatgatccgtctgttgcggggattatttatcatacagtgaagttttgcgatttttacagcttcgaatatgctgagatcaagaatcatacagatgtacctcttttaaaaatcgaatcagattatactattcagagcagcggtcagcttcttaccagactggaagcttttgcagagagcattcagcctgaaacactggagcagaccatagatggagacacaaaaggagagagaaaaatgggaaaaggttatttcgcagggattgacagtggttccaccagtacagatgtggtgattttaaataaagatcatgagattgtgaccagcattatcctgcctacaggagcaggagctgctatcggagcagaccgtgcccttgcagaggcattgaaggaggccggattgcagagagaagatattgatgcgctggttactaccggatacggacgtacagctattaaaaatggtgataagagtatcacagagatcacctgtcatgcaagaggtgcgcatttcctgaatccggaagtccgtactgttattgatattggcggacaggacagcaaggtgatccgactggatgagaaaggtgcagttgcaaactttgttatgaatgacaaatgtgcggcaggaaccggacgatttctggaaatgatggcacgtaccatggaaatgaatctggatcagatgagcgaatgtgggctggaattcaaagaagatattacaatttccagtatgtgtacagtatttgcagaatcagaagttgtatccctgatcgcccagaataaggcaacagatgatattgttcatggtctgaataaggcggttgccgtaaaaaccgcagctcttaccagacgtgtgggcggtgaggagaaatatatgatgaccggtggtgtttctaagaataagggcctggtaaagacactggaagagaagcttggaacaaagctggtaatcagtgacaaggctcagctttgcggtgcacttggcgcggcgctgtttgcagctgatatggctgatgtataaaaattatttaaatatccagggattttacaaggtggaaatctctggaatttttatactttttttataaaagtttaattttctattgacgagttcaaatttaagagctatagtataccacagtaacagcaaattaacgaggtgaagtttgcaggaaagaggaagccacacaaaaggctatacccgccgaaggagtaaaactctcaggttccctggatgcagggaagaactgcaaatggatcgtttctctggagacacccgttagatcgggggccgaaggtgcaaataacacgaattatcaatagctacccacaaatggttatctgattcgtgtcttgaatctctcaggcaaaaggacagaggatgctttatcatccccgctgattcatatgaactatatgaacagtattttctgaacttctgatttttgaaacggtctgttattactttgtttcccagctgtacaatatattacactttttaaaagaaaaaggagatttattattatgtgggaagcgatcaattcttttttgacaacagtagacaatctggtctggggcgtgccccttatggtcctgatcatggcaggtggtatcctgttaactgccagacttggacttcttcagatgcgaagactccctcttgcattgaaatggatgtttaagaacgaagaagaaggcgatggtgagatttccagttttgcagctttatgtacagcactgagcgccacaatcggaaccggtaatatcgtcggtgttgcaactgctgtctgtgccggaggtcccggagctttattctggatgattcttgcagcattcttcggaatggcaacaaaattttccgaaggtcttcttgcagtgaaataccgtgtggtagcagaagacggtcacagccttggcggtcctttctattatattgagaaaggtatgggaacaaaatggaaatggcttgcaaagatctttgcattctttggtgtatgtgtaggtcttttcggaatcggtacattcagccaggtaaatggtatttccagtgcagttcagaacttctttgatccgaacaaatcaaactgtgtaaatattccgttccttggagagtattcctgggcagttgtaatttcttccctgattcttgcagcctgtgttgcagcaatcctcatcggtggtctgaaacgaattgcaacagtcagccagattattgtaccgtttatggcggtgatctatctgatcttcagtgtagcgctgattcttttaaacattacagagatcccggcagctatcgtaacagttgtgaagggagcctttaatccgtcagcagtgacaggcggtgtggtaggaacaatgatcgtatccatgcagaaaggtgtggctcgtggtattttttcaaatgaagcaggtcttggtagcgcacctatcgcagcggcagcagctcagacaaaagagcctgtacgtcagggtcttgtaagcatgactggtacatttattgatacaatcgtgatctgtacaatgacaggcctttccatcgtgctgacaggtgcatggcaggtagaaggtctggaaggtgttcaggtaacaacctatgcattccagcatggacttccgatccctggacagatttctgcatttgtattaatgatctgtctggtattctttgcatttactacaattcttggatgggattattacagtgaaagatgtctggaatatctgacaaacggacataagaaaacaatccttacataccgctggctttacattctggcagtatttatcggaccgtacatgacagtaagtgctgtatggacgatcgcagatattttcaacggactgatggcgattccgaatatgatcgcattgttcgcattaagtggagtgatcgtaaaagaaacaaaagcattctttgcagcagaaaagcataaaatgtaaggaatcaaaagtaataaaataacagaaaacagtaaatcctctgattatggaatttatagcaatcctgatcagaggatttttttgcttacatttgactgactatgacttttttgtgcaaagtgaaccaaaatcagtcattatttttatggattagtttgattgactttgaacgaatatgacagtatactaagaacgtaaacaaaaaacagtcacgaacatgcagaaaagacatgacaatatgtacttttggaatcttttggtgcaagtgaaataaagactccgaaaggataccaatataaaacaggagggaaaagaagagatgatttacacagtgacttttaatccatctctggactacatcgtttcggtagatgattttaaactggggctgacaaacagaacaagttcagagctgatgcttccggggggaaagggaattaatgtttccacagtccttatgaatcttgggattgagaacactgcacttggatttaccgcagggtttgtagggaaagaaattatccgtagattacatgagatgggagtaaaatctgagttcattcaaattagtgaaggggtttcaaggatcaatctgaaactgaaatctattgacggaaccgagatcaatggtgcaggaccggtgatcagcaaggataaagtagaggaattgatgaagaaactggaacagcttggagaaggcgatgtacttttcctggcaggcagcattccatcttctatgccggatgacatgtatgaacagatcatggcaaggctggatggaaaaggtgtgatgatcgtagttgatgccacaaaggatcttctggtcaatgttctgaaatatcatccgttccttgtaaaaccaaataatcatgaactgggcgagatcttcggtgtagaattaaaaacaagaaaagatgtaattccttatggaaagaaacttcaggaaaaaggtgcaagaaatgtgctgatctccatggccggcgaaggtgcagttctggtagcagaggatggacaggtatttgaagaacctgcaccaaaaggcaggctggtaaatggtgtgggtgcaggagattccatggtagcaggattcgttgcaggctggatggagaagaaggattacgaacatgcattccacatgggaattgcagcaggaagtgcaagtgcattttctgaaaatcttgcaagaaaggaagaaatagaagcggtttatcgtcagataaccgaaaaataataaagggggaagaaaagatgagaataacagacctgcttgacagacgaagcgtatcgttaacagctgctccgaaaacaaagtcagaaactctggatatggcagttgatctgatggtaaagagtgagaagatcagcaatcgtgaggcttatcgtaaacaggtatatttaagagaagaagagagcacaacaggtattggcgagggaattgctattcctcatggtaaatgtgatgcagttaagaagccgggacttgcggcaatggtcatcaaaaatggtgtagagtttgaggcactggatgatgaacctgtaaccttattattcctgatcgcagcgccgaatacagaggataacattcacctggatgtactcagcaagctctctgtgatgctgatggatgaggagtttacagaatctcttcgcaatgcatcgtctgtagatgagtttatggatattattgacagggcagacagtgaaaagaaagatattgatgagagactggcagataccggatcaacagaaggaacacaggctaagatccttgctgttacttcttgtcctaccggtatcgcacatacgtacatggcagcagaaggaattgaaaaagctgcaaaagcaaagaactgttttataaagatcgaaacccgcggatccggcggtgcaaagaatgtgctgacagatcaggagattgctgatgcagactgtattattgtcgcagcagatgccaaagttcccatggaacgtttcgatggtaaaaaagtgatcgaatgtcaggtatccgacggaatcagtaaagcagatcagctcattgacagagcaatcaatggggatgcaccggtctaccacgcagcagccggttcccagacatcttctgccggtaacaaatccggcggcagtgtaggacataagatctatatgcagctgatgaatggcgtatctcatatgcttccgttggttgtaggcggtggtatcctgatcgccattgcgttcctgatcgatggattaagtgtagatttaagtgcgcttccggcagatcagagagcaaacttcggtaccattactccggtagcggctctgtttaaaggcatcggtggtacagcattcggatttatgcttccgatccttgccggatttattgcaatggcaatcggtgacagaccggcacttgcacttggtctggtaggcggtatgatggcagccaacggtaaatctggtttccttggagctttgcttgcaggctttgcagccggatatattattcttggacttcgtaaattatgtgataaacttccggaagccctggaaaagatcgctcctgttttaatctatcctgtagttggaatccttgttatgggactcctgatgacatttattgtagagccggttatgggcggtatcaacacaggtctgaataatgccttgacaggaatgggaagttctagtaaagtaatacttggcattgtgcttggcggaatgatggctattgatatgggtggtccgttcaacaaagcagcatatgtattcggaacagctgcaattgcagcaggtaactatgatattatggcagcagttatgattggcggtatgacacctccctgtgcaattgcactggcaacactgctgtttaaggataagttcacaaaagaagagagagatgcaggtcctaccaactttatcatgggtcttgcatttatcacagaaggtgcgattccattcgcagcatctgacccccttcgtgtacttccttcctgtatcgtaggatctgcggtggcaggagcgatttccatggcattcgactgtacactgatggcaccacacggtggaattttcgtattccctgtggttggaaacgcagttatgtacctggtcgcactggttgcgggaacagtaatctctgcagttcttcttggtctgttaaagaagaaagcagcataagcagcgaaataaaaaagcaataacaaaaaattaaaataaagaacatggaggatatcaaaatgaaagaatttaagtatgtagttacagacaacgaaggaatccacgcacgtcctgcaggagaacttgtaaaactggtaaagggatttgagtcaacaatctctattgaaaaagaaggtaaaaaagtagactgcagaaaacttcttgcactgatgggacttggcgttaagaaaggtcatgaagtaacattcacaatcgaaggtgctgatgaagaagcagcatatgaagcagtgagcaaattcatgcaggacaacctgtaaatttacggaataaaataagaaactgacagacaggagatgatgcattcatctcctgtttctgttataatgaaatatcagggtcaaaaggcagaaagtcgttcgtgcttgcacgataagacttttgaacttgggacccgccaaacatgaggaagtagcgatttacgaagtaaatctgcggattccgaatgtttgtagaattgcgggagctacgaagcagcggagcaattcgtagatatcggagaaaataatcagaagtaaacaatcaaagcaaatatacaatggaggcaggggtacatgcttacagaacagagatttgatattattctgaagcttctggaagaaaaaaagagtgttacagtaacagaactgagagaacttctggatgcatcagagtccacagtgcgcagagacattactgcattggacaaagcaggaaaacttaccaaggttttcggcggtgcagtagcattaaatcataaagtaactgcctatgaaccgacagtagcgcagaaatcagaattaaataaagaagaaaagcaaaagatcgcaaaatatgcagccagcctgatcacaccggatgattttgtttatctggacgcaggaaccaccactggcctgatgctggaatatctggcaggtgtaagagctgcctttgtcaccaatgcagtatcccacgcccagactctggcaaagatgggaatccgggtttatttgatcggaggagaactgaagagttccacagaagcagtcgtaggcagtcaggcaatgcagatgatccagatgtatcattttacaaagggatttttcggaacaaatggaatcaccagaagagaaggcttcaccacaccggataccagcgaagcaattgtaaagagtactgcaatgaagcagtgcaaagatgtatatattctgacagataagtcaaagtttggcgaagtaagttctgtgacattcggcgggtttacagatgctaaaattcttacagaagaaattccggaggagtatcaggatagcaaaaatattctgaaagtgaaataaataattgacagtatgccgccggcagacagagcaggcaggaatgatattaagattggagagatgtgggatgaagtttgcgcatattggggatttgcatattggaaaaagggtgcatgatttttccatgctggaggatcagaggtatattctggatcagatgatgaaaatctttgcggaacagaaagtggatggagttttaatcgcaggggatgtttatgataagacagtgccgtcggcagaggcagtgcagttgtttgatgagtttattacaggactggctaaagctgagattcctgtgtacatgatcagtggaaatcatgattcagcagaaaggctttcctttggggcaaagctgtttgaaagcagtgatatttatatttcgcaggtttatgatggagagatgaaaaggattgtgttaaaagatcagtatggaccaatatctgtatatcttctgccttttttgaaacctgcggcagtacgccatgctttgcagagggatgacattaatacttatgaagagggtgttatggctgctctgcaggagtgtgagatcgatacgacacagagaaatgtgctggtggcacatcagtttgtgaccggagcagacagaagtgactcagaagaaacatgggttggcggtcttgacaatgtcagtgcggaagtatttaaggattttgactatgtggcactgggacacatccacagacctcagaaaatggggagagagaccttgcgttacagtgggacgccgcttaagtattctttttcggaagcagatcataaaaagtcggtaacgattgtggagcttctggagaagggaaatgtgagggtcagtacagtacctttgattcccagacgggatatgcgtaagctgaggggaacctatatggatgtgacagcgaaggatcattatactgctgaaaataagatggattatcttcagattactctgacagatgaggaagatgtgccgggggcactccagaagctgcgtactgtttatcccaatctgatgcgtctggaatatgacaataaacgaacacgtgagaaccgggaggttcaggcagtggaggttcaggaacaaaagtcagagctggagctgtttgaggagttttatgagctgttaaataatgaacctatgaaagaagagcagacagagtttgtggaaaaactgatccaggatctgaaggaggtgcgcgtatgaaaccattgaagttgacattatctgcatttggtccatatgcggatgagactgtgatcgattttacacagcttggaggacagggcctttttctggtgaccggagatacgggagcgggaaaaacgacgatctttgatgggattacatttgcgttgtatggggagacaagcggaggagtccgggaggcatccatgctcagaagtaagtatgcaaaaccggaaacacctacgtatgcggaatatatttttgaatataaagatgcagtgtatacagtgaagcgaagcccggattatgagcggccaaagaccagaggcactggaatgactacccaaaagggggaggcgttgcttactttttctgatggaagagctcctgtgacaaagctaaaggaagtgaaccaggcggttactgaactgatcggactggatatgaagcagtttacgcagatcgctatgatcgcacagggagatttcaggaaattgctgctggctgatacagaggaacgcagcaacattttcagaaagcttttccatacggatatttataaggtgattcaggaaaaattaaaattcgaggccggtggtctggacaaggcgtataaagagctgttgagaagtatccgccagtatacggaacaggtcagatattctacagaagatcagctgggacaacagtggatattgatggagaagaatggctttgaaggaaatctggaagagagtctggaaattctggagcagtttctgaaggcagataaggataacttgaaagctgtaaataagcagatcaaagagaatgatacagaacttgaaaaagtaaatcagcttttgggaaaggctcataaagaagcagatgcaaaggcaaggaaggaacagcttctgcaagagagagaaggattgcttccacagttggaacaggcacaaaaagatgcagaaaatggggcaaaggaaccagaggagatccaacgcctgatactttccatacagaaagaaaaagagaatctgaagcgttatacaaatctggaaaatctgcgcagagaaatagaaaatgtttcaaaacagattgaaaaattggcaatagacagtattgcactgcagaatcgtcagaaagaaaagaaaactgttcttgaacaaaaacaaaaagaatatcagacaacagacagtgcggagaaagaaaaagcagaaacagatttccggaaagagaaaatagatactctttatgcaggagtttataagaactgcggaaatcttgagtttcttcagacaaaaatcagtgaactgaaaatacagtccggacaggaagaacaacttgcgaaacagataaaaaaggatttgactgatctggaagagaaaattgtttccggtgggaatttggaaatcaaagagaacagcctggtcgtatgtttgcagcagatacagaaaatagaagatcagcagaaacggtatcaggatctggaaaagaaagcagaaagcaaaaagaaggcttatctgaccgcttctcagaaacgggcagaaataaaagaaattttaaacaaaatggagcaggcctatctggatgcgcaggcgggtgttctggcagcagatcttcaggatgggatgccatgtccggtatgtggttctgttcatcatccgaagctcacacagattccgaatgaagttcccacagaagaacagctgaaaaaacagaaaaagttaacagaagctgcggaaaaaacggcatctgacgcaagtgtgcaggcaggagaggcagcaggactgatgcagcgctgcagggaagaactgacagaaggggttaaaggctatatagcgcagtttctgccagaagaggagacacaagagatacttcgaaaggaacttcctgatcatgaattatgtttatttgtaaaaaatcaggaaagcagtgtacagacaggattggaagaaatcaaaaaacagaaaaaagttcatcaggatttactgaagaaaaaagaagagttcatcacacagtcagaacaacatgcaaaagaatttcagaaattacagatcagtcttgaaaagaggaagagccagctggaaagtattcaggaacagctgcagaatcaattggacgaacctgtactgacatggatccatgaagaagatataagacagagaatgaaaactgatccggaactgtcacaggatcacagcggtgaaatagtgtatcaaaaggaaatctgtaatgtatcacaggctttgctgcagggaaagagagcagcagaatggctgaaacagcagcaaaatattctgggacagaaacaaaaggatctgacagcacttctggaacagagaaaacttctggagatgcagattggtaaaactcagacagaacttacaacgatcacagaccagatcaatcagaatcagcagcagacagcagcagagaaatccagatatgaacagctgcagaagcagagagagaatatggaaaaagagctgggtgaaaggacaaaggaagaaatcctgtctcagatccagcttaagactgaggaacaaaagaagcttgaaatacattacaaaacagtaacagaagcgagagaagtattagaaaagagaatgacagagctggattctgtaatcgcatctctgacagaacagttaaaagaatccataagtatttcagctgaggaactgaatgttcagaaagaaaactttgcacagcaaaagaaatcactttcagaaaatcgtgatgaaatccatgcccgtctggaaatcaacagtgacatgtatgaaaaaatccgcagacagcagacagaacttctgaaaacggaaacccgctggaagtggatgaaatctctctcagacactgccaatggtacgatcacgggtaaggcaaggatcatgctggaaacttacatccagatgcagtattttgaccgcattcttgcgcgtgccaatatccgtctgatgaccatgagcagcggtcagtacgagttagttcgcagaaaagaaaacaagagcagggtagggaaaaccggtctggaactggatgtagtagaccattacaatggaactgttcgaagtgtcaagaccttatcaggcggagaaacatttcaggcatctctgtctctggcactgggactttctgatgaaattcagtcaagctccggcggaatccagcttgataccatgtttgtggatgaaggtttcggatctctggatgaagatgctcttgatcaggcaatccgcgcattgaaggatctcagtcagggaagcagactggtggggattgtttcccatgtagcagagctgaaagaacgtattgataagaagatcatagtaacaaagaaacggacagaagatggagttggaagtacgatctgtatagaaggatgagattttatggaattgctctgctgcaaagcggctcccacaattctcaataagaaatagagtagaaaaacagaggggatacagtatgtatattcctctgttttttgcgatttaaaaaattactaaaaagttatataaaattaacttgacagaatatcagagatagtatatattaaactatagagttagatgcaaataacttaagctactgaccaatctgttgaaggtctttttgcagcagtaaattcaagccttacagcaaacaaaagcaataaaatgtttcgtaaagctttattttttaataaatggttagtgcattctaaccgatattttgttattgagaaaggaatcataacatgctggagaaatctgtgatcgaacattgttcacctacattagcatctattaaaaccggaaatctttttacatataaatatgaatctgaggaagaattatggaaaagcgtagaaggttttaatgaatgtgtaagagaaaaaggcgtttccctcacagtacttcgcaggagtgagaaaaaggcgctgatttatgtctgccggttctcaagccttgaaagagatctgaagaaacctggtgttgcgaatttcataaagaagtatgggtatgagagtacagatcctgcatatgcacttgagagactgagaagccgcctggcccagagagaagattttcctcatgaaatcggattgtttctgggatatccactgggagatgtgatcggatttatcaagaatgcagggcagaactgtaaatgtgtaggttgttggaaggtttactgcaatgaatgtgaggcaataaaggcttttgccagatttaagaaatgtaccaacgtgtatgtacgtctttggaatcagggaagaagtgtacgccagctgacagtagctgcgtaaggaagaagctatatacagtaatatagcagggacggagagtccatttaagaatcagtataatagaaaagccgtatgactttttattataatataaatcatggctttgcggcaaagaaaaagcagagcgaatttaaggaggattttaatcatgagtaaagtagcagttgtatattggagcagcacaggaaacacagaggcaatggcaaatgcagttgcagacggagttaagggaaaaggcggcgaggctgttcttcatacttgtgaggattttgacggatctaaagtaactgaatatgatgcaattgcttttggatgcccggcaatgggagatgaagttctggaagatacagagttcgagccgatgtttgatggatgtaaagatgcactcaaaggcaaaaatatcgctctttttggttcttacggatggggagatggcgaatggatgcgcaactgggaagattcctgcaaggaagctggtgcaaaccttgtatgtgaaagtgtgatctgccaggaagaaccagatgatgaagctacagaagcatgcaaagcactgggtgctgcattagtataattgaaataaatatgagaaaataatgatttacgtaataaatcagcgggttctaaatatttaaagtgcgaaaaagagactgtttacatattaagatgtagcagtctcttttatagttttgctaaattaagtaagtctcctgcattaattacgaaggataatgagcagcggatgggaaattacttataccgggaaaagtgcaagcctcttcttataaactgcgagacagttatttggcgtagagctacataacgaaatcggggaatagtatcgtacagataataatcaagtcaaaagtgtttcgtgttcatggagcgtacgatattctcttggcgtacatccataacattccataaaatatttggaaaaataacttaaatgattaaatccgcacaagatagcaatctctgttatgcttttctgcgtagtgcacaggagacggcagctgatctttaatcggtaggtattgagaaaatccacaggagactgctgcatataatgtttaaatatctggcagcatttactccttcctacatgaccggcggctgcaatatccgtaagagatattttctcaggataatgctgataaataaaggataccatatctttctgaatgttcagttcctgttcggactctgatttattttttgcagctgacagcagatcagtgcggataagaaagctccatagttccagcatacagcttataacacctaattcataacctgaatcagaatcttctttcaacaggagaacttcctgtaaatatctgccgactttcacccctgcttcatcatttgagtaaaaatgatgaaattccaggctggtgttttcgaaaaaaggaagaaaatatttttcctgtaatatctggttattcccaaacaaagaagggtgaaacagaatacagagaaaatagcagtcctgttgttcaaaagcatatccgtaatgcatctgtcttgcattgaccatcagggaatcaccttcatttaagataagtctttttccgttcacataatatctcatttttccagtgataatatagatccattcaatatcatcatgccagtggcagggagcacacatgttataataagaagcaagatgtgccgcccggatatacaaaggaattccggcatgatcataaggaactacttctgaagaatctggcataagttctgttctgattaatcccataaattcacctcgcgtacgatttttataaaaaataaggactattctgatagattactgtatctgagaatactataattataacatctgcagatgtaaaaaatcaatcagagggatatgatggaatcagaaaaaagaattttttacagaaagctatggggactggtatttccaatcgcaatccagaatcttatgactgcgctggtaagtgcttctgatgcgtttatgctgggatttgtcagccagacatcattatctgctgtttcactggcaacacagatacagtttgtacataatctgtttatgcttgcccttacgattggcgcgacaactctggctgcgcagtactggggaaaaggcgatacagattcagtagaggagattctggcaatcgttcttaaaatttctatggctgtatcagttgtattttttatagctgcaatgtttttttcgggatttcttatgagaatatttacgaatgacataagattgattcaggcaggaattccgtatcttcgaattgtgagtgtttcttatctgtttatgggattttcgcagatttatctctgtattatgaaaaacagcggaagaactgcaaagagtaccatctatggatcagtagcggttgtgattaatattggatttaatgtgatatttattttcgggctagcgggatttcctgctatgggaattgcgggggctgcacttgcaactacagtttccagggcgcttgaattgctactgactatttatgaaaatatgcaccgttcattagtatgtgtccgactaaaatatatccgaaacagctcgaagaaactgaaaaaggatttctggcactatacgacacctgttcttggaaatgaactggtctggggatgtggatttaccatgttttcggttattatgggacatctgggcagtgatgcggtggccgccaattccgtagcaaatattctgaaaaatattatcgcatgtgtatgtaatggaatcggaatcggagctggtattattgtcggaaacgagcttggaaaaggcgagatggaacgggccacggaatacggaaacagactttttaagcttgcggtatttgcaggcgcagtttcagggcttatacttttggcagtgagcccggttttaaggatatttacgggcagtctcagtgcacaggcacattcttatttaaagaatatgatgtatatctgtacctattatatgataggaaagtcggtgaatgctacagtgattgccggtgtattctgcgcaggcggagacacgaaatttggactgaaatgtgatgcagtaacgatgtgggtgattctgatcccgatagggatgataacagcatttgtgctgaaacttccgatcatggtggtttattttattatcagcatggacgagataataaaacttcctgctgtatatagacattacaaaaaatataactgggtgagaaaccttacagaactcaattaaatcagaatataaatgcttggaaatagtgtaactattaaggcttctggcacatcatttacaaaataatgatgtgataaggttgtgcagggtatttaacagttaaaaataaaaacgtaaaggagaagataacaaatgaatcagagagaaagaatgttaagcggacttccgtacaaagcgtggttagatgggcttgaagaggacagacaggcatgcaaacagaagatttatgattttaatcagctgccaccatccaggcagagcaaggaagcacctcagatgataaaaaatatttttggaaaaacaggcgaaaatgtctgggtggaagcaccattccactgtgactatggctggaacattgaagtaggtgagaatttctattccaattataatctgacaatccttgatgtgggaaaagtaacatgtggaaaaaatgttcagatcgcgccaaatgtctccatttatacagcgggtcatccggttcatccggacagccgtaattcaggatatgaatacggaattcctgtaacagtgggagataatgtatggatcggcggaaatacagtgattcttccgggtgttaccgttggaagtaatgtagtgatcggtgcaggaagtgtagtatccaaagatatcccggataatacgatcgcagctggaaatccatgtaaagtaatccgcaagattacagacgaagacagaatctattactttaagaaacagaaatttgatgatgaggcgtgggaagaagtaaagaataaaaataaatagcagaactgacagtttgcctatgccaaaatcccgagacatactttgcgaagcgtgttgctgtgaacggagtgaacagtaatcaattccacaaaatacagataaataatagacaggagatgatgcattcatctcctgtttatgttacaatgaatatgataaatatgggagttgttcagtaatggagcaatttgcagatatcagggtggatagagtgaatatacagatggaggcagaagatgctgacagaacagaaatttgacattatctgaaaaaggagagagaaaatgagtctgaaaattgaaaagaaaaatgaaggaacaaaagatacggtatttttgaccgggagattagatacagcaactgcacctgaattggatacttttgccgagaaagagttgatcaatactcaggaacttgtattggattttgcagggcttgaatatatttcatcagccggcctgcgtgttattctgaaaatgcagaaatttatgaatgtaaaaggaactatgaaattgattcatgtgagtgatatcatacaggatgtattcgatattacgggatttgcagacatactgtcaatcgaatgactgtggttgtaaagatacagaactgcacagcgaaaagggggattctatttacctgaactgaatgaaggaaggagaagtggatttgaaaagtattacagaagaagcaaaaatagagaatatagcggtaattacagattttgtaaattccatactggaagcaaatggatgttctgcaaaagtacagatggagatagatattgcgatagatgagatatttggcaatattgcctattatgcttatacgccaaaaactggagaggcaactgtacaggttgaaataaagaattttcctgaaagactggaactgacgtttatagacaaaggcattccttataatccattagaaaataaagatccggatgttaccctggatatagaaaaaagaaaaatcggggggcttggaatttttctggttaaggaaatgatggatgaggtttcatatgaatatgcagacgggaaaaatatattgaaattaaaaaagaatttatagatttcatacattgtaagtgtatattgctattcatgaacttttgaataactgcgcgtcgcattatagttactgtggagtggactgcagcgatttatgtgctcatatgttgcaaaatgacagaaaagaggagtttttgcgcatgacaattcggaaaatgtatgatatgatgaacttataaatatcaatttgtaactgtaaaaatattatattgtaaaaaaacacacacaattacccgcaaaataagaaatttagacgcaagattgttcgagaaatcaacttgtcggcacactaacaggaaatatgggtagaaaatatctgtaagaaatatgtataaaataatatgtaatcaggaaggagatataaattatgggattgatcaaagcagcagccggtgcatttggcggaacaatggcagatcagtggaaggagtttttttactgcgatgcaatagataaagatgttctggttgtaaagggtgagaagagagtaggcggacgttcttccaacaaaaaaggcagcgataatattatttcaagcggttccggaattgctgttgcagatggtcagtgtatgatcatcgtagaacagggaaaggttgtggaggtttgtgcagaacccggacagtttacctatgatgcatccacagaaccaagtatttttgccggaagtctgggagaggggatccacaggacttttgatacagtaaagaagcgttttacatttggcggcgatacaggcaaagaccagagggtttattattttaatacaaaagaactggtagataataaattcggaacagcaaatccaatcccattccgggtagttgacagaaatatcggtcttgacatagatgtatctgtgcgctgtaatggagtatattcttataagattgtcgatccgctcctgttttatacaaatgtgtgcggaaatgttgaacagcagtatgacagagaagaaattgaagttcagttaaagacagaatttgtaagtgctcttcagcctgcatttgcaaaaatctcagaacttcagatccgtccaagtgccattccgggacatgttctggaattatgcgatgccatgaatgaagcccttacgaaaaaatggcagcagaccagaggtcttgcggttgtttccattgccatgaatcctgtgactcttccggaagaggatgcacagcttatcaaagatgcacagaagaatgccattctcagagatccgactatggcagcagcgacacttgccggtgctcaggcagatgcaatgaaatcagcagcctccaacactgcaggtgctatgaccggatttatgggaatgggcatggcaggccaggcaggtggagcgaatatgcagaatctctatcagatgggggcacagcagcaggcagcacagcaacaggcagcacagaatatgcagccggcatccggggcaggaacatggaaatgtgaatgtggtgcagagaatacaggaaaattctgctctgaatgtggtaaaccgaaaccgcagcgggaagagtggatatgcagctgcggcgcagtaaataccggtaaattctgttctgaatgcggaagcccaagaccgaccggaaagtggacatgcagctgtggtgcggtaaatacaggaaagttctgtgcagaatgtggaaagccaagacagtaaaatacagcagggggagaaatgtctatgtctgatctgagagaatataaatgccctgcctgtggcggtgcaatagaatttgacagtaagtcccagaaaatgaagtgtccatactgtgatacagaatttgaactggaaacattaaaagaactggatgcgcagatggagcgtgaagccggacagcaggatgatctgtcaggatggcagacagatgccggtggagaatggcaggaaggtgagacagatggaatgaatgtctatacctgtcagtcctgtggtggtgagattatcgcagatgagaatacaggagcatcaaattgtccgtattgtggaaatcccgtaattatgacagagaagtttaaaggtgcattaaggccggatctggtgattccgttcaaattggataagaaagcggcaaaagaagcatattacaggcatattaagggaagaacatttttgccaaaagcatttcgcagggaaaatcatattgatgagattaaggggctatatgttccgttctggctttttgacggggatgttgatgctgatgtgcgttataaggcgacaaaggtaagaatgtggagtgaccatgattatgattatacggagaccagctactattctgtggagcgaagcggagagatgacattcgtttctgtacctgtagatggatcagaaaagatggcagatgatttgatggaatccattgaaccatttaaaatttcagagtctgtggattttcagaccgcatatctttccggatatctggcagataagtatgatgtcagtgaaaaagagagcatcaacagggcacatgaccgtatgaaaaagagcgcagaggaagtactggcagatacagtgaagggttatgcttctgttgttcccgaaaatacaaacgtaaatatttcaggcggaaaagcacagtatgcactgtatccggtatggattctgaatacaacatggaaagataagaaatatatatttgcaatgaacggacaaaccggaaaaatgacaggagaccttccgattgacaggggaatttatttgaaatggcttgccggactgaccgctgtatttacggttgttttgtgccttgccggactgctgattttttaggggaggacgaaagatatgctgaagaaaaagatcatacctgtatttctggcttctgtccttactgtatcaggtacaacaggatttgtgacggaagcattttcagaaaatgtttatgcagcagaagaagtgcatacagaaaggctggcagattttgcagatctgttagatgatgggcaggaagaagaactggaggcgaaactggatcaggtcagcgaggactacggctgtgatgttgtggttgtcacagaggagactctggatggtgcagttccgcaggattatgcagatgatttctttgattataatgactatggcatgggagaggacaagagtggtatattgtttttgataaccatgtcagaacgtaagtggtgtatctccacacatggagaggctattcagatttttactgatgcaggacaggaatatatgacggataattttgggtcatatttatccgatggtgagtattatgagggctttatgaagtttgctgatctgtgcgaagaatttatcattcaggcacagagcggagaaccgtacgatgtagaaaatctgccggaggaaaccatccctttttatatgatatttctcatttcgcttgtggtcggatttgtgatcgcgctgatcgtaaccggagtaatgagaagccggatgaagactgtacatatgaagccggatgcagcagattatatgaaagacggaagtcttcatattaacagaagccgggatatatttctgtatcatcaggtcacacgtacggcgaagccgaaggaagagagttccggtggcggtggaagcagtacccatacaagttcttcgggtgagacgcatgggggttccagtggatcattttaactgactggcatgacatataaaaatcctgatcttttatattattttatgggataaccataaaatgacaggaaagattgggattttattttgcgcaaaattacggataccggttgcaagacatcagagaatatgatacagtacaaggtggtttgttttgtgtagagacagttgtccggcaaaaagaaaataaactgcgaagcggattgcaaatatccgcctgacgataacagatttctgcacaaaagaattataaaatgaaataaaaaacagaaataatggagaggacatgaaaaaatacgttgataattttatgcaataccggtttcttttgtcagaactggtaaaaaaagggattaagctgaaatacagacgttcttatctgggaatgatatggtctatgttggagccgttgcttaccatgatcgtgcttacaattgtatttggtactttgtatggaaatacagacaggacctttcctgtatatatcctgaccggacgactcctgtacagtttcttttcacagtccaccaaggccgctttgaaatctatacgtcagaactcggcaatgatcaaaaaggtatatgtacccaaatatttgtatccgctgtccagtgtgctttttaactatgtgatctttctgatctcactgatcgtactggcaatggtgagtgtgatacttggtgtaaagtctacgttctatctgcttcaggcaccaatcgcactgatactgattcttattatgtcatatggatgcggaatgatcctggcaacaataggtgtatttttcagagatatggaatatctctggtctgtagcacttatgctggttatgtatacatgtgcgattttctattatcctgaaaagcttttgaagagtggatgggcatggatactgaaatataacccattgtattgtgtgattgatattttcagatgttcagtatttggaaaagcgatgaatattcattattttgcatatgcacttatcttttccgttgtggcaatggtgattggattattctgcttcaagaagaaacaggatgattttattctttacatctgagaactgagacagaaagctgcagggcagcggaacgaattatttttgaaaaataaggagaaaaaatgagcaaacaaccagcgattattgttgataatgtgagtatgaaatttaatctcagcaaagagaaagtagacagtctgaaagattatattatcaagtcaattaaaaaagagattaaatataatgaattctgggctttgcagaatgtgagctttacagtggaaaaaggagacagggtaggaatcctcggactgaatggtgcaggaaagagtactcttcttaaggttatcgcaggcgttttcaaaccaacagaaggttcagttacaaaacatgggaagatggttccgcttctggaactgggtgcaggatttgatcaacagtatacaggaaaggaaaatatttatctttacggagcaatgcttggatattccaaagaatttattgatgagaagtatgatgagatcgtgaaattttccgaattgaaggattttattgatgtgccgatcaagaactattcatcaggtatgaaatccagacttggattttcgattgctacagtggtttctcccaaaattctgatattggacgaggtattatctgtaggtgatgcgaaattccgtaagaagagtgagaagaaagtactcagcatgtttgattcgggtgtaacagtgttgtttgtctctcattctctggcacaggttcagagaatctgtaataaggcgatgatccttgaaaaaggaaaactgatcgcttacggagatatcgatacgatttctaaacagtatgagaaaatgactaactgacagggacagacagagatatctgtctgacagagaaaaaatttaagaagtcagaaatatccggaggagtatatgacaaacggattaaaaaaagaagattcagcagctttaaaaggtcttgcagtgttactgctgatctttcaccactgctaccgtcttgcagacagaatcgaaagatatcaggtggatctgtgcgggctgacaacagaacagcttgttgctattgcggaatgctgtaaaatctgcgtggcaatatttgcatttgtatccggttacgggctgatgtatggatattcggctaaaatgaaaaataaagaaaagtatgcagtatcagaatggatatccggacatcttctttccactatgtccggattctggtttactgcagctgtatcctatcttatttactttggacttggacttaaggatccgagcaagtggggagaaaccttttatgaaagaggattcgccgtatttgcagatatactgggaatctccagacttttggagactgaaagtcttaacggggcatggtggtatatgagtgctgcgtttgtatttattatattgcttcctctgttagatgggacgattgagaaatttggaggcatattctgtattgcagttatctttttgcttcctagaattctaggtattggatttcagggaggctcaaagccatattcatttcttttgatatttgtggcaggaatgttatgctgtaaatataatttctttcaaaaattgcatgaatacaggcggaaaaaattaaaattcatctgtttgtctgctttactgtgtgccggccttttcttgtaccataaaatcgacctgaaaattttctgggaattccggtatgcacttgttccattcctgctgattctcttttgcgttgaatatttgttcaggattacgcctgtatccttgttccttcagtatctgggcaagcattccatgaacatctggctggtacatacatttgtgagagattctctgggaaaatatgtatttgcattaaaaaaattctggctgattcctgttgcagttcttgtgatttcgctgggaatcagttactgcctggattttcttaagaagattacaggatatcagaaactgatacggctgttaaagaaaaaggtgacggaacattatgcggtacaggaatgatttttcgagaggatcgcaataggatttagagtggacaatagtgacggatgggagagcgtatcatgaaaatactgcagattggaatgggaaatgttgccggaggtctggaagcatttgtgatgaattactatagagttctggtgcatatggatatacagtttgattttgtgtgtatgtatgataaaattgcatatgaagaggaaatcaggaaactgggtggaaggatctactatattccaaatgtaaaaaagaactatcagggctatataaaagaactgaaaaaaatattaaaagaaacaaaatatgatgcagtacatgtaaatatgctttcagctgcaaatattgttccgttacgtgtggctcatacaatgaaagtgccaaagataattgcgcacagccacagctcttcctgtcccggactgatcagaaaaatcatggacaactggaacagaccaaagattgcaaaatatgctactgacaggattgcatgcggagaaatggcgggcaggtggctgtttggagataaagctttccaaagcggtcaggttacgttgatcaataatgccattcaggcagagaagttcagtttttcagaaaaagacagagattcactcagaaaggaactgggatgggaaaataaaacagtgatcggtcatgtaggaagatttgatattccgaagaatcatgacagaatgcttgatattttccaacagatcgtttccgaaaagaaagatgtgatgctgtgtctggtaggtccaaaggaaggtctgtacaaagagataaaagagaaaacagtgcagaaaggactggaagataaggtatattttgccggtaaacaggagaatatccgcaggtatttatctgctatggatgtttttctgtttccgtctgtttttgagggtgtgccatttgcgcttattgaagcccaggcaaatggacttgcctgcgtaatgtcagaggcggtgtctgaggaggcagttgtttttcctgagagagtcagacggctgtcacttgacagagataatatacagtgggcggcagcagtgatggcaatgagttctatgaacagagaagcggctgatctgataaagaagcggctgtcagatgcgcattttaacattgagacagaggcaaaacgtttgaaagatttatattatcatacgaggtaaattacagatggacaagattgattttgtattgccatgggtggatggatcagactcagcctggataaagcagagaaatgagtatctgggaattaaaaatgaccagacacaggacagcagatttcgggactgggaaaatctgcagtactggttcagaggtgttgaaaaatttgctccatgggtgaatcatatatattttgtgacatgggggcatatcccttcctggctgaatacagatcatccgaaactgacagttgtaaaacacgaggattatattccgaagcagtatctgcccacattcagcagtcatcccattgaactgaatatgcatcggatccgaggtttatccgaacagtttgtatattttaatgatgataccttcatcataaataaaatggaaccggaagactttttcagaaatggtcttccaagagactattgtatagaaacagcgttggtacaggatgatatcaataatccgtttgcctgcattcttatgaacaatgcggcacttgtaaatatgcattattcaaagagagaagtgattggcagaaactggaaaaaatggtttcatcctgcatatggaaaaatggtattcagaaatatgctgatgcttccgtacagggagttttccagttttaaatattctcatatctcaagctcttttttgaaaagtacctttgaagaagtgtggagggaagaaggcgaagtgctggacagagtatgcaggacacgattccgttctccgggggatgtaaatcagtatgtgatgaaatactggcagtatatggagggaaaatatgaacctcaatcaccgaaaatcgggaaattttttaccataggtcttcacgaccggcagatacatgatgtactcagaaatcagaagtgtaaaatattgtgtataaatgatacggaaaatataggagatttcagacaacagaaaagaaatatcaaagattcttttgagagtatccttcccgaaaagtctgcatttgaattatcttacaaagattccggaggcatgtatgacaaaaagtgcgattaaaaaatatacggaaaggctgggctttttcggaatgatcctgcactatatcggtcgttttatgacaaaaacagagcagcaggtcattggaaagctgactgtgcgttttggaaaagtaaagaaaaaccggcttgtgtttaaaaatcgggaaatgatggactgcacagataatccggaagctttttatgaatatcttataagttccgggtataataaaaaatatgagatcatctggctggtctctgaaaaaagaaaattcagaaatcagaataccggaaatgtaaaatttgtaactgctgaaaataaatatggatggagcagtccgctggcatattattatggtgctacagccggatttttcttttattctcataacagtgcaggactgaacaggtatcggtgtaaaggacagacagttgtaaatctgtggcatgggtgcggttataaagatgcagagcagggaaagaaaaaacagaatataaagcctgattttgactatgcacttgttcccggaccggtatttgtgaaaacgaaatccggactatggaactgcgaaccggacaggctgttaatgatgggatatcccagatatgactggatgctgcatccgtcaatgagtaaggatgaaattctggacagtctgttcggatggaaagggaaaaaagctgttctgtggatgccgactttcagaaaaagtgatctgggagggtgtgcggaaaatgaaattgagcttccctgtcagcttccggcaatacagaatatgaacgagctgaaagaactggacagttatctaagggagcaggagattattctgatcataaagaagcatccgcttcagacggaatgggatgagaatgaacaggagtttaccaatatacgttatgttgcggaagccctgttggagaaaaaacagataaaactttatgaactgatagggatcagcgacggtctgctctctgattactcgtcagtggcagtagattatctgctgttggacagaccgcttggatatgtgcttgcggattacaatatatataaagaaaaaaggggatttgtatttgaagatccgctggaatatatgccgggtgagaaaatctataatgcctgtgatatcagaaaatttatgaaacatctgactgatggaacagacagttaccggcaggagagagcaaagaatctgaaacagatgcacaataaaacagaaaactattgcaaaaggcttgcagattatttacaattgtagctgttatatgaatgcgaagagaacagttatctattaatgcaataaaacagggagaatgtaatggagaaaaaaataggatatacacagggaacctttgatatgtttcatataggacatctgaacctgatcagaaatgcaaaaaaacattgcgattatctgattgtcggtgtgaatgcggatgatctggtagagtcatataaaaacaaaagaccgattgttccgctggaagaaagggcagagattgtacgggccatcagatatgttgatgaagtgatcgtgacgacaaccctggacaaaaagcaggtatgggaaaaagtccactttaatgaaatctatatcggagatgactggaagggcaatgcacgttgggaaaagaccggaaaagaaatggaagagctgggcgctaagctggtatttctgccatataccaaagatacatcctcaacgatgcttcgtgagaaattaaaagaattctagggagccagatatgaaaaaaagaataaaaaagaaaataaaaaaactgaaaaaatccattaacaagattaacaaggtcagagttcaaaagggaagaaaagctatgttgcaggagacatgggcaactgtgacctatggattatatgataatcgcaagatcagacgccttaagaaattcccccctgcacttgtagagaatagaatgctctttgaaacaaatgatgattttacggataatggtcgtgctttgtttgactatcttattgagaaaggatacaacaaaaagtatgagattgtatggctggtccatgaaccgtctaaatataaagaatatcagtttgaaaatgtgaaatttgtgcagaactttaagaaaggttccacgatccgaagagcagaagcatataaatatgcactgacatcaaaatatattttttacacccaggcttttaactggattggtatgtcgagaagaaatcagctctttatcgatctctggcatggctgtggttacaaggcaaataagaacgggcgtaaggttttctttgattattgtctggtaccaggggacatttttattaagaccaaaatggaattttttggatgtacttccaaaaaactgctctcgtttggatatccccgttatgatatgatgcttaagggcagtgaacgtgcagatgaatataaaaagaaacttctgaaggaaacagacagcgagaaactgatcctgtggatgccaacctacagacatgcttccagtgagcgtctgaacgaggaaaccttaaataatgaattcaatattcctatcattgatgatgcagataagcttctggaactgaataagttctgtaaggagaatcatattcttattgttattaagaagcattaccttcaggtaccttatgattttggtgagaatgtccttaccaatattgtttatctggagaacagagatcttgcggataacggactgcagctttatgagtttatcaactgttcagatgcgctggtttctgactattcttctgttgcaatcgattatctgctgttagacagaccgcttggattcacactggatgattatgaggcttatacggaatccagaggatgggtgtttgatgatccgctggaatatatgcctggcgaacatatgtataatatgcgggattttgagaatttcatcctggatattaaaaacggaaaagataattataaagaacagcgtgccagtgtaagagcaaaaacacataatgtgtgtgacaattactgccagcgtgtgttggattattttaacattacaatgtaatgatattatatcaattccataaattactgcaaacaatccaatccatcatagcgtgaagtcctgtgtcagatatctttgccgtgcgtcagcacgcctgcagatatcttccttgtccttcacactctgctgaactgtcttgattgcattattttatggaattgctataggatatagatatcagaaagtcataacaggagaaaaagataaatgaaaatatgtatttggtgcaccaagatatttgatcttggcggaactaagcgagttgtcacacttcttgcgaatgaacttgtaaaagagcatgatgtgacgatcatggtatatcaggacagatttaaagaagaccggaatatgtatcatatgagtgaggatatcaaggttgactttattgataataatgagtttgtcaatcgacatcatacaccggctttctgctggcgttatcttgttcagaaactgaatgccaaatatgggatttttaataaagaaaaatataatgatattctggcagatgcgattttcccgaaaaagaccagagaaaaatgggtaaaatatttaaatgagcagaattatgatattattatcacaactgcaagtttaagccttcgtctgggtatgctggcgccggagctgaatgcaaagacaatcggatggcagcataactgttatgccggatatcttgatgttcctaatgtcgtattctggaaacaggaatgtctgctccaggaatatctgccgaagctggacagatacattgttctcagtgactatgataagcgcgattacaaaaaatttctggatattgatacagaagttaaaattaatccccgaagcttcgtgagtgagagaaaatgcgacccaaaatccaagcgtttccttatggctacacgatttgtatatgccaagggtcttgatctgatgatggaatcttttgaagagttctgtaagcaggatgatgaatggcagctggatattatcggagccggtgatctctggaatcagattgtggcggatgcaaagagacgtggtattgaggacagagttaattttgtcggttatacaaatgagccggagaagtattacctgaattcttctgttttccttcttccatccaggtgggaaggatggccgatggttatcatggaagcctttgaatttggtcttcctgtcatcgcattccatacaggagcgatggatctgattatcgatgatggaaaaacaggatatctgccggaagcttttgatacaaagaaatttacagatgcgatgctgaagctggcacatgatgaagaactccgcagagagatgtccagaaatgcaatctggaaatctgaggactttgccattgagaaggcagttaaagagtggaatcgtctttttaatcgtgtaatgggaatcaagaccttttatatgaaaaatgaagaacagattctggagtgcagggagaaatatccgcttagaaccagctatgccgagtttgtaaaggaataccagataagagataatacaattctttatgaagcttttggcggacgtggtatgatctgtaatccttatgctctgtttttgtatcttcttgaaaaagaagagtatcaggattatacccatatctgggtgcttgaggactttgaggataacagaaaacaaattgaaaaatacgaaaaatatccgaacgtgcgatttgtaaaatataaatcaaaggaatactgtaaagaacttgcgacagtgaaatatctggtaaataatgtaagctttccaagctatttccttaaaagagaaggtcaggtactgatcgatacctggcatggaactcctctgaagaatatgggatttgatattccgggagcaaatatttctcagggaaatacagcaagaaatctgctcagtgcagattatatagtttcctccggaccttatatgacaaagacagcatacaaagattcgtataaaatgcagaatctgtatgaaggcacagtgctggaagagggcttcccgtgtaatgataagctttttgacagtgacagagcagaagtgatacaggaacttaaggattgcggagtggacgtaaaggaagataaaaagattattctttatgcaccgacatggagaggcgaacaatacagccgtccggatacagatttgcaggatgtctataagctgatcaatgtaatggagaacagtatagatacaaatgaatatcagatctttgtcaagcttcatcagatcgtatatcactatatgaaagagaatgccatggaacctggtgatgcgcagacaaaatttattcctgcaacaatggatacaaatgagattttgtcagtgacagatgtactgatttctgattattccagtattttttatgatttcatgctgacaggaaaaccgattctgttttatgtgccggatgcggagaattttgaagattacagaggtctgtacttcggatttgacaaacttccgggaccggcagtgtctacccctgagaagcttggtgaacttctgaaggatcttccgggagtggctgcttcctgtaaagagaagtatgaaaaagcaagagaacagatatgtccgagagatgatggaaaagcatgcaaacgtatagcagaagtcctgcttgatggaaaagaaccggtaaatccgatatatctgaatcagacagataaagtaaaacttctggtatatgcaggagatttcagtgatacacaggagacaaaggcattctatgaatttctgaacaaagtggattatgagcattttgatgtgacgttgatcgggaatggtgcaaaagaagaggagtcttctgagaaactggatagtctgccaaaagaaatcagggttttatactggaagcgttcctacccggctacggacgaagaatatgtatgtcataaaaagtttatgaaatctaagaaaacagaagtgccggagatgcttctggatttttacaggcgtgagcttcgcaggatgatcggaatgtcaaagttcgactatgctctggtatttactgatatgaagaagttctttcctgcaatgtcaggggctctggatgtgaagcagatatttaatatagaaaactggcagaatttgttgaagtgttaaagcttcattgaagcttcacagacagatcagaacctcattggaaagaggcggaaaacggtatattttaaaagatatgtaaggcagtctggcaggtattgggccaggctgcttttctgaatacggatcttgaattatcattttatggacgcagataattacgcatggatttcagtgcatttttttcgagacggctgacctgtgcctgggagatgccgatttcctgagctacttccatctgcgtctttccttcgtagaagcgcagttctatgatatgcttttcgcggctgttcagcctctgcatagcttcgcggagagcaagattttcaatccagcgttcttctttgttttttttgtcactgatctgatccatgacataaagagtatcaccgccttctgtatagaccggttcaaagagactcacaggattttggatagcatcaagggcatatacgatcatttctttttcgataccaatttcctgtgcaatttcggtaactgtaggttctttcaggtgctgcttcatataattttcgcgggtatagattgctttgtatgcaatatcacgaagagaacggctgacgcggatactgttgttatccctgagatatcgtctgatttcgcctatgatcattggaactgcataagtggaaaattttacctgtaaagtggtatcaaagttgtcaatggccttgatcagaccaatacatccgatctgaaaaaggtcatcggcattttcgctgctgttctgaaatcgtcgtattacgctgagaacaagacgtagatttcctttaatgtacaattcacgtgcctgttcatcgccgcttttgatccgtctgaacagttccgctttttcttctgctgtaagaacaggaagtttcgacgtattgactccgcagatttcaactttgttcagtgccatcttattgaatcctccttattatctctggatgtaaaccgactattcgcagatatgagccaggatcctccgaaatcatttcaggaaataaaaaaaggacagtggctgccgaatagttgtcatatacttcagtaagaatgattctcatatagcagtggatttatactttgaccgggaaaatataaaaaatataggtccttgacaattctctgcggtgaaatatcagcctttatggaaacatttttcttcgtctattttcacaaggatgatatcgtccccgatctggctgatacattcccagggaatgatatattcattatcacgtccgaacaggcagcagaatcttccggggcctggaagtataagggcggtgagttgactgcttttgcagtcaaattccgcatcaatgggacatccgagactgcggcaggtacagatattaattacttctttttgctttaattcacagattttcataaatcagatacagtccttccggttaaaatcagactgtcgtgccaatgctttcagaatctgatatgcgtttgataacaatttatgtatttttgcaaaaatttatgcaagtccttttattgacaccttaaatagaaatacagtataataaaactatatataactgtttgtatttgtgttactgagaatggagtgaacagtaacgtatttgtagccgtttaaccgaatcaagtatatagtacataagcagaaaacagtaatacgaattaaagggggacgtcgtatgaagtgtccattttgtaatcaggataatacgagagtagttgattccagaccggtagaagataccaattctatccgtcgccgtcgtttgtgtgatgcctgcggaaggagatttaccacatatgaaaaggtggaaagtattccgcttactgtgatcaaaaaagatcagaacagagaacagtataatcgcagtaaaattcagtcgggaattctgagagcctgctataaaagaccaatatccatagataagattgaagagatgatggatgccatagagggagaaatctttaataccgaagagaaagagatttccagcaccagaattggtgagatcgttatggaacatttgaaagatctggatgcagttgcttatgtacgttttgcgtctgtatacagagaatttaaagatgtcagtacttttatggacgagctgaagaagtttatgaattaaataagagttctgtgtgaacaagtaatgtatgaatgctctgtgtgaaaggatttacgggcaaatataaagagccgacgagaataatatcccgccggctctttatgtgtatttttatgggggtaattaactaaaataaattaaacaataccctgagcgatcatagcatctacaactttctcgaagcctgcgatattagcgcctgcaacatagttgccttccatatcataacgcttggaagcatcatcaactttatggaagatatcaaccatgatctgatgaagttttgtatcaacttcttctgctgtccaggaaagtcttgcagagttctggcacatttcaagtgcggaagtagcaacaccaccggcattagctgctttaccaggcataaatgttacaccgtttgccataaggtaatcagttgcctcgcgggtagtaggcatatttgcaccttctgcaacatatttgcatccgtttgcaataaggatcttaacagcatcaaggtcaagttcattctgagttgcgcatggaagatagatatcacatttgatgttccagataccttttccttctgtataagtagcgccttctacgcgatctgcgtattctttgatacgtccacgttttacttctttgatatctttaacgatgtcaagtttgattccttccggatcatagatatatccgttggagtcgcacatagcaacaactttaccgccaagttcggcagctttctctactgcgtagatggcaacattaccggaacctgttacgatgagagttttaccggagattgtgtcgtttttagctttaaccatttcgtttagcatatatacaagaccatatcctgtagcctgtgtacgaatcaaagatccaccgtaggaaagacctttacctgtgagaacaccctcgtataatccacggtttctcttgtactgtccatacagataaccaatctcacgtccgcctacaccgatatcacctgcaggaacgtccatgtcagcaccgatatatttggaaagttctgtcataaagctctggcagaatgccataacttctctgtcagattttcctttaggatcaaagtttgaaccacctttaccgccaccgatcggaagacctgtaagggagttcttgaaaatctgttcgaaacctaaaaatttaaggattccctggtttactgacggatggaatcttaaaccacctttgtatggtccgatcgcactgttgaactgtacacgataacctttgtttacctgtacaacacctttatcgtctacccacggaactcggaaagagatgattctttcaggctcaacaagacgttccagaatggaaagcttgcggtatttctcttcatttttgtcgattacgactttaagggagtctaaaacttcctttactgcctgatggaattcaggctcatttggattctgtgctacgactctttcgtatacttcttcagtataagacattatgatttcctcctcgtccatcgtataattattttttaaatcgacgttattatacactaaagtgttacaaatggaaagagccaaatgaaaatttttttatgaaaattttttgaacaaaatttgtacttgcgaaatggcgccaagtatgagaaaatgttaaaaatcatccatacaatttatagcaatttctaaaaaatacagtatatttataaaaactgcgtaaattcgcactgtacgtttcggttcttatattgccatgtatccgtaagaaactgcaaatggaaagtcaagcggatattcgcaattgaagcaggggacttacttgattcggttaaaaaatgcctcgcaggacagtagtgcgtgaacagtaagcggtaatctgtttttttatgttcagaaacagaatatataagatgtagaccgaaagagaaaaaaatgctataatatttacagagatgtgcatctacaaattgttgcgatgacagaaacgaggagggaatcattatcgagagaattgtgaagaaaggagatttattacatggcgggatttaaaaccaaagtaacacctgaaattgaaaatctgacggaggtttgcaaggaacatacaagtctggatctttctctgtatgcaaaatatgatgtgaagagaggtcttcgtgatattaatggaaaaggggttcttgcaggcctgactcaggtttctaatgtgaaagccacaaagatcgttgatggcaaagaagttccatgtgctggaagtctttcctacagaggatatgatatcaaagatcttaccagaggatttatcgaagatgacagatatggatttgaagaagttacctatcttttattatttggcagtcttccagataagaaacagcttgcagattttacacagcttctggcaaatcagcggtcacttcctacaaattttgtgcgtgatgttataatgaaggctccgagcaaggatatcatgaacgggctttccagaagtgtgcttactttatattcttatgataccaaccctgacgatacatcattgccgaatgtgctcagacagtgtctgaatctgatcagtgtatttccgcttttatctgtttatggatatcaggcttataaccattatattaaagataagagtctctatatccataatccgaagaaagaacttaccacagcagagaacattctgagaatgcttcgcccggataagaagtattcacatctggaggcaaagattctggatattgcgcttatccttcatatggaacatggcggaggtaataactctacattcacaactcatgtggtttcctcatcaggaactgatacatattctgcgattgccgcagcacttggctcattaaagggaccaaagcatggcggtgccaacattaaagttgtcaggatgtttgatgatatgaagaaggaagttaaggattggaaggatgaagacgaggtccggacatatctgaagagacttcttcataaagaggcatttgaccggaagggactgatctatggaatgggacatgcgatttattcagtgtctgatccgcgagctgaagttttcaaggcatatgtggaaactctggcaagggaaaaaggcagaatgaaagattatgccctgtattctatggtggaacgtctggcacctgaagtaattgcagaagagcgtcgtatttataaaggtgtaagcgccaatgtagacttttacagcggttttgtgtacagtatgctggatctgccactggaattatatacaccgatgtttgcagttgcacgtatcgtaggatggagtgcgcaccgtatggaagagctcattaatgcagataagatcatccgtccggcatataagaatgttctggaaccggcagtatatgttcctcttaatgaacgctgatcataatgattcagtatttcggggacagcgtactgtcagacacttatcgctgatcttgttttcagaaaaatataaataaaggaaatgactacggatgtttaattgcttttttccggatgaatatctggattctacctatgtgataaacttcgatgatctgtatgcgcagggatacagaggacttctgtttgatatagataatactctggtacctcatggtgcaccggcagatgagagagcatgtgcgttgtttgcacatctgaaggaacttggatttaaatgctgttttctgtcaaacaaccagtacgagagagtttcttcttttaatgatgcgataggagcgcagtttatcgagaatgcacacaagccttcaacaaaaaattatatcagggcaatggaacttcttgggacagacagaagtaatacagtttttataggagatcagctctttactgatatatatggtgcgaaacgcacaggaatccggaatattctggtgaaaccactcaatccgaaagaagagattcagatcgtactgaaacgatatcttgaaagaattgtactatatttttaccgcaaagaggaggggaattcatgaaccatattgttatcataggatttatgggttcaggtaagacaagagtaggaaaacggctggcaaaagatttcaatcttccttttgtagacgttgaccgcgtagtatcaaagaagatgaaccttacaatgaaagaaatctttgacagattcggagaaccattttacagagctcttgagacaactgtgatcaaggcactgatcgatgatccggaacagaagatcatttctctggggtccggtcttccgatgcaggaacagaatgcaaaatatattaaaaaactgggaactgtagtatatttgaagggatcttatgcaacgttgaagaagagactggaaaattccagcagcaatcctctgatcgagggagaagacaaagaagataagatcagaaaacttcttaaacagcgcgatccggtttatacaaagtttgcagatgttgagatgatcacaggagacaagccatttgaggatctgattggtcagcttgaagaaaaattaaaaacatgtgtaaaaaatagttgaaaaaaacagcagaatattataaaattaaataagagtgtgtcacaaaactgagaaaagcatgagagggacacacactttgaacggctgttgttgtcaaaagacacagcattgctgaactgtactattaaggaggaaatataactatgatttcagcaggtgatttcaaaaacggtatcacacttgaaattgacggaaacgtatgtcagatcgttgaattccagcacgtaaaaccaggaaagggtgctgctttcgtaagaacaaaatacaaaaacattattacaggagcagttcttgagaaatctttccgtccaacagagaaattcccggctgcacgtattgagcgtgtagatatgcagtatctgtatgatgatggtgatctgtactactttatgaacgtagagacatacgatcaggttggtcttacaaaagatcaggttggagattctcttaaattcgttaaagagaacgagatggttaagatctgttcccacaacggaaatgtatttgctattgagcctcctctgttcgtagaacttgaagttactgagacagagccgggattcgccggaaatacagcacagggtgccacaaaaccggctactgtagagacaggtgcacaggttcaggttccgctgtttgttaaccagggcgataaactgaaaattgatacaagaacaggagaatatctttctcgagtataatcaggatgaaaccagttgttttttctgattaacagttgtaaagagataatcagactgccatcggtaagatccggtggcagtttttatctttgattggaataggagaaaaaatatggaatacgtaacacttggaaaaaccggtctcagggtttccagaatgggccttggcgggataccgatccagaaaattgatgcggaaggaacaaagacactgctgcataagctagcagaccggggagtaaattatattgatacagccagaggatatacggtcagtgaagaatatctgggatatgcactggaaggtatcagggacagatttataattgccacaaagtccatggcacgtacaaaggaagccatggctgaagatattgagaagagtcttcataatctttgtacagatcatattgaattataccaggtgcataatccgagtatggaacagcttgatcaggtgcaggcggccggtggtgcccttgaagcactgcaggaggcaagagcagcaggaaaaatcggacatattggtctgaccgctcattctgtggaggtttttgcccgggctctggagcttgactgggtggaaactattatgtttccatataatattgtagagagtcagggggaagagctgatctcaaaatgtgaggagaaaaacatcggctttattgatatgaaacctctggccggtggtgcaattgaaaatggaacgctggcattgcgttatgtctgttcgaataagaacgttactattgtgatcccgggaatggcggaagagaaggaaatcgaggagaatataaaggcctgtcttgatgattccccgttaagcgagaaagaactggaggaagttcagacagtacggaatcagcttggcacaaatttctgccgcagatgtaattactgtgctccatgcagtgtgggaatcgatatttcgggtgtgttcctgttcgcaggctatcttaatcgttacgggctgggagactgggcaagaaaccgttacagttctcttgcggtgaaggcttccgcctgtatagaatgcggcaaatgtgaaaccagatgtccgtaccatctgccaatccgcgaaatgctgaaagaatgtgcacaacagtttggtgaataaaaaacatccacagggaattaccctgtggatgttttttatggagatggtgtgtctttttttgttcaaaagaaagtgggacaattggtaacagatgatgatatcatcattaaaatcctttggcgccataaagaataccagatgtgttttggtaatcaaactatcggatatgccatggaacaagcacaataaaaagttggtaaaatcccatatagaagggatgtattaccaacttttttagattttataggatattaatttctgagaaatcaatagataaatcttcgtaaattccagcttttacagtatcagtgaacgaatattcttcaatggaataatcatgattaaagttgtatactgtaattctgttttttgcgatatctacgatccagtattcccggacacctgcggaatgatatttgaaaagtttcaggagataatccatttttctgctttcaggcgatacaatttcaataatccagtctggtgcgcctttacatcctttatcatcaagtttgtttggatcacaaatcacagatatatctggttcgacataagtattatttatttcatcaagatatacggcgaatggtgcaggaagcacttcgcaagttcctttgtgctgttttatataattacggatgatagcggaaagctccatgacgagtttctgatgtttgtacgatggtggtgccatataatagatgtgtccgtcaatcagttcagctctttcgccatctggcagagcataaatatcttcaatggtataagattcttctttgagtaaagccatacgatcacgctcctttttgattatattatagtggatttacataaaatatttaacactgaccatctggcagcaactctttttttatatttgtaatttgctactgtcacaggtcattgtacaccagaatctatttctgaatgtgctcgttataaatgtgaacaggcaaaaattccggttaaaagtatacatgctattcgcaggactttaaattcacgtatgcgtgtaaatggtgcagattcagtgacaactgctgtcctgattggaaacacaccagaagtaaatgaaaatttctacacatatgatgtaagcgaatcagactataaaaaagagcttatccgtaaagtatcactttgtggataaactctttatcatgccttgattacacttgcttgcttacttcctgcttacttaaaaaaaccaagagataaaacccttataaaatcaaggaattttatggacctggcgggaattgaacccgcgtccgaaagcctattcattgaggcatctcccatcacagtcgctgttttaacattcccttggatgtacgcccaccgacaggcttacaaccttagtagcttcatgatacatctaccggggcaaagcttacccggcaaggtttctcacatggtcgacgtcagattcctgaagtgtgagtgcatcagggctgacgagcagcaattaggctgctaacgcgtactgttcgtctgcgtttatatttagtttcccggttggtacgcagtctgggagtctgcggatggcttccccaacttcaaagcccccgtcgaaaccagtacaagccctgaaaatgagtctgcaacgctgtttttcataaaacagcactggtgatgagacgaaagcactttttaatattgatatatcattcattatataaggtatatcgactgattaacagtatagaaataaaaacagaatttgtcaagaagatttttatatttgaggctatttggtgttgtgaacagcaatacttataatttttctgtcatatgttcacaaatcttacataaatctctgctatagtaaccatatgaaagataaaatctgttgctgagggcgattttcccggattttgcgctgtggctgtaaaggcgctgaacagtcgtggattttaacaatactcggaaaacagtataaataaaaagtaaaaactgtttcggaaaataatgaagaaaaacggagggaatcaaatggatacattaaaaatcctggtggtggatgatgagagccgcatgagaaagctggtaaaggatttcctgacaaagaagaatttccaggtactggaagccggtaatggtgaagaagccatggatatcttttatgaggagaaggacatcgcactgatcattttggatgtcatgatgccgaagatggatggatgggaagtttgccgtgagattcgcaagaactcaaaagttccgatcattatgctgactgcaagaagtgatgagagagatgagcttcttggatttgatctgggggtagatgaatacatctccaaaccattcagtccgaaaatccttgttgcaagagtggaggcaattctgagacgtacaggtcagaataatccggaagatgtgatttcagcaggcggcattgttatagataaagcagcacatctggctactgtggatggtaagcctatggaactgagctttaaggaatttgaacttctgacatattttctggagaatcagggaatcgcactttccagagaaaagatcctgaattctgtatggaattatgactactttggagatgcccgtacgattgatacccatgttaagaagctcagaagtaaaatgggagataaaggtgaatatataaagactgtatggggtatgggatacaagtttgaggtagacgaatgacaggaaacggaaaaacagataaaaaatttcatactctgcaacatcagatttcagtagtgtttatatgtctgttactgctttcgatctttaccattactctgatcaatggtctttttcttgaaaaatattatgtatccaaaaaagtagaagtgctggaggaggcaaaagaagtgttgtctcagatgaatctggatgacatcctgcagtatgatacagatatagaagaggacaaaaaaggggcaacagatgagatttcggatgagattgagaggagcagttccagaaataaccttacctggatcatagtaaatgaggaaaacagcggttattattactggggagagaataatatggcaaagatgctccgcagtaagctgtttgggtatattaataatctggatcaggatatgcagcacagtcgtgtgctcaaaaagacagatacctgtaccatgtggcaggtgcatgatcgctttgcaggcatggaatatgtggaatgctggggacagtttgataatggttactatttcctgatccgttctcctctggaaagtattaaggaaagtgcatctatttccaacagtttttacttcattgtaggaataatcataattgtggtcagcggtattgtgattcttgtgatgacgaatcgtattacccgcccgatcagtgaactgaccaaattatcagagaagatgtctgatctggattttgatgccagatatcaaagcagggcaggtaatgagattgatgtacttggcgataactttaacaaaatgtccagaaaacttgagagcacgatctcagagttgaaatcggctaataacaagcttcagaaagacatagaagataagattaaaattgatgagatgcgtaaggaatttcttgataatgtttctcatgagctgaaaactcctattgcattgatccagggatatgcagaggggctgaatgaaaatatttccgatgatccggaaagcagggaattttactgtgaagttattatggatgaggcttcaaagatgaacaagctggtcaaaaacctgctgacgctgaatcagctggagtccggtaaagatgccccggtgatggaaagatttgacattgtatctctgatcaggggtgtacttggttccatgcatattatgatcgaacagaaagaagcaactgtgatttttgaagaaacagaacctgtatatgtatgggcggatgagtttaagattgaagaggttgtgaccaattatacaagcaatgcactgaaccatctggacggagagcgaaaagtagaaattaaggttcttcaggaagaggactgtgtgaaagtaaccgtatttaatacaggtactccgattccggaagaggatatcccaaatctctggaataaattctacaaagtagataaggcccggacaagagaatatggcggaagtggtatcggactttcaattgttaaggcaatcattgagagtatgaaccagaaatatggggtatgcaattatgataatggcgtggagttctggttcactctggattgcaggcagtgataagatatccgggtattgtgaacggagtgaacagtaaccggtagtatgaccggaataaaaacagacagaagcaaagaaagcactttgcaactgtctgtttttgggttatactgtattggagcgttttgatcggatattttattccggtctgacatgtgatccggaaagccttcggattaccataatgaggaaaacagataatgacatcaggaggataacatgattgcaataattgactatgatgccggaaatattaaaagtgtagaaaaagcacttcattatcttggggaagaaacaacagtaacccgcgatccgcagactttgttaaatgcggataaagtaatcctgccgggcgtgggaagctttggacaggcgatggagaatcttcatacatacggacttgtacctgtgatccatgagattgtagagaagaagacgccatttcttggaatctgcctgggacttcagctcctttttgaaagcagcgaggagacaccgggggtggaaggccttggaatcctgaaagggaaaattgttaagattccgcctgcgcccgggcttaagattccacatatgggatggaattctctgcattttcagaataatggcagactgtttcagggaatcccggaacagacctatgtatattttgtgcattcttattatctgcaggcagaggagcctgagattgtaaaggctactacagaatacagcacctgtattcatgcttccgtagaaaaggacaatgtatttgcctgccagttccatccggaaaagagcagcaaatggggactgaagatacttgaaaattttgctgctgtgggaaaagacggcaatactgagaaggagggaaaataaaatgtttacaaagagaattattccctgcctggatgtaaataacggacgtgtggtaaagggcgtaaattttgtgcagcttcgcgatgcgggtgatccggtggagattgccaaagcctatgatgcagcaggagcagatgaactggtgtttctcgatattacagcatcctgcgaacagagagatacggtagttgacatggtaagacgggttgctgccaatgtatttatcccgtttacagtaggcggcggtatccgtactgtagatgattttaagaaactgctgagagaaggagcagataagatttccgtaaattctgcagcaattgacagaccggaactgatcagtgaggcggctgacaagtttggaagccagtgcgtagttgtggctattgatgccaagcgcagagaagacgccggatggaatatttacaaacatggcggaagattggatacagggattgatgccatagagtgggcaaagaaagtggaagctttgggcgcaggggaaatccttcttaccagtatggactgtgacggtacaaaagcaggatatgatctggctcttaccagagcaattgctgatgctgtctccattcctgtgatcgcatcaggcggtgcaggtacactggagcatttttatgatgcactgaccgaagggggagcagatgctgcactggctgcgtctttgttccattataaagaactggagatttctcaggtgaaggattatctgtctgacaggggaatttctgtcagacgatgaccacgaaaaatataagaggtgaaggataaggtatgtcagcaatttcaggtgactggctggaagccctgaagggagagtttcaccagccgtattatgcaaaattatataaaacggtgatgacagaatatcagaccaggaagatttttcctcctgcggaagatctgtttaatgcatttcattttacaccgttaaacgaagtgaaggtagtaatcctgggacaggatccctatcataatgacgggcaggctcatgggctttgtttttccgtaaagagaggagtggagacgccgccgtccctggtgaatatttatcaggagcttcatgatgactgtggatgctatatccccaataacggttatctggagaagtgggcaaagcagggggtgcttcttctgaacacagttttgactgtacgtgctcatcaggcaaattcacacaggggaatcggctgggagcagtttacggatgctgcgatccaggttctgaatgagcaggaccgtcctattgtatttctgctatggggacgtccggcgcagatgaaaaaatccatgctgaataatccgaagcatctgattctggaggcacctcatccaagtcctctgtctgcttacaggggatttttcggatgtaaacatttcagtaaaacaaacgaatttcttgttgccaatggtctggaaccaatcgactggcagatagaaaatatataagaaaagaggtaatgtgtagtcaggtaaaagacacacagtgataacatgaatcagaaaaacaatttagtaaaaaatgcatcctttctgatgattgcagctatgatctccaaggtgatcggtcttctgtacaagagtcccctttccaatattataggaagccttggaatgggctatacaagccttgcgcagaatgcctatatgatccttctgatgatcgcatcctttagtattccacaggcggtatccaagctgatctccgagcgtattgctctgaaggattacagaaatgcacataagttctttaagggtgccatgatctatgccatggtgattggcggagtggtcggtttgttctgtctctttggagcagggctgatcatccctcagaatcagaaggatgcaattccggcacttcagatcctggctccgacgatttttttgtccggtattcttggggtattcagaggatattttcaggcatacagaaatatgatgccaacatctatctcccagatcattgagcaggtatttaatgcggcagtcagtcttctggctgcatggggatttatcaatgcattctcagatggaacagagaacagcattgcaaaatggggggcagcaggttccacagtaggaaccggagccggagtggtgactgcattggcattcatgcttctggtatatggtgtgaaccgcagaaaaatcctgcaccgggtagagagagatcacagacaccaggaagagtcctacaaagagatttttcgtgtgatcatcctggttgtttcgccgatcattctcagcgcctttgtttataatgtaaatgcttatatcaatgggtatcttttctcggatattctgggaagaagaggtggagatgcggcacagattggtattttatatgcagagtatgctacttactttatgacaattattaatattcctctgacgctgtccagtacggcacctacttccatgattccggaagtttccgccctgtatgccaccggagacattgaagcgaccagagagtgcattgaccagaccgtacagctttctatggtggtttccgccccatgtgccatgggactggcagtgcttgcacagccgattgtatttttgctttacggaaattccacaggactggcagccaacctgctgatccttggttctttttcaatcctgctcaatggaatgtcaaatatttccaatggagttctgcaggcaatcggacagcagaggattccggtgattacggcagcaatcgcactggttgtggatattgtggtagtggtagtgttgctgtttactacaaaccttggagtttacgcactgctgatcgcaatggtgatctattctgtggttgtatgtgtgttaaatgacagagccatgaagaaatatctgcagtataagaatccatggaaagaaggatatctgtatcctgttcttgcatctgttcccatgggaattgttgcaggctgtatctgctatggactgaacatttttgtaaaatccaatttcatttgtctgatcgtttccattcctgttgctgcggttgtttatctgtttgcttacctgatcatcagcaagccgtcagaatcacagcttagaagaattccgggcggaagctatctgataaggattgcagagaaacttccgttctggcagaataattaaacactgaaattataaaaaacaaaagagttatatttcatggtttaaatgtagttctgaaatagaaacacatttaaaatttctgaaatataactctttttttgagcgcgtttgaaaaatgcttttcgcaaagcaggatatgtagattgcgggaatgatttttcaaatatgctctagagcgtgtctgaaaaatcattcccgcaatctgcacgtcccactttgcggtatattttgtccgaattcggttgtcgtagcccgctacgacgccctcatccgaacaaaatctcccacaaattgtgacgcacatcttgcgtaaagcatttttcagacacgctctaaggcggatatattgcaaggtaaaatacattgcaatatatccattacggtattatttatgcatttttttcttctgcttttttcaggtttttctgggctgtggagagcatcagtttgattcggttgagctggttaacttcacttgcacccggatcatagtcgatggctacaatattggctgtcggatattctctgcggatttctttgataacacccttacctacaatgtggttcggcagacatccgaaaggctggatacaaacaatattcggaacatctccatggatcagttccatcatctcacctgtcagaaaccatccctcacctgtctggtttccggtggaaacgatcggagatgccatttttgccagatctctgatatcagcaggcggtgcaaaatggcggctctgtgcaagagcttcgcttgcaggctttctcacccattcgattgctttgattccccagtttgccatggttgccttggacttcttgaatccaagattttctaccttaaagttctgattatagaagcagtagcacatgaaatcgatcagatccggtacaactgcctcagcgccttcagattccagaagctctgccagatgattatttgcagcaggcaggaacttgacaaggatctcacctacgatgccgacacgaggcttcttcacatcactgatcggaatggtatcaaattcatgaaccatttcgcggcacatttttttaaactggctgtggctgatactgcttccgcttaagaaagagatcacacgctgttcccagattttatgtttcctgtttacgattccctcttccagttcataaggacgcatacgatatacgcatttcatcaggatatctccgaatacggcaccgtaagcaactttcttcactaatggaagcgtaagtttgaatccgggattgctttccagaccgcttaagttaacagagataaccggaatctgttccataccggctttctttaatgcgcgtcgtataaatgcgatatagttggaagcacgacatccgccacctgtctgggacatgacaacggccgttttgttcaggtcatatttaccggaaagcagagcatccatgatctgtcccacaacgatcagagacggatagcaggcgtcattgtttacatacttcagaccaacatccactgcatgcttattgtcattcggaagcacctccaggttgtatccgcaggaattgaatgctgcctgcaggaggctgaaatggaacggtgacatctgcgggcagaggatggtatagtcctttctcatttcctttgtaaaggatactttatcaatggaagcaggtttgacagtacgtttctgtccctgtgctttcttcgcgcggatcgctgcgatcagggaacggatacggattcttgcagcaccaaggttatttacctcgtcaatctttaagcaggtatagattttgtcacttccgtcaaggatttcataaacctcgtcagtagtaactgcatccagaccacatccaaaagagttgagctggatcagatccaggtcatcgcgtgtctttacatagtttgcagcagcatacagtctggagtggtacatccactggtcattgacgcggatcgggcgttccacaggtgccagatgagagatggaatcctcagtaagtacggcaataccatagctgttgatcagatccgggataccatgatggatttccgggtcaatatggtatgggcgtcctgcaaggacaataccatggcgtcctgtatcttccagatatttcagggtttcttccccttttttctgtacatcgcggcgtgcagcagccatttcctcccagcccttatgcacagcagctttgacttcttctgccgggatatccttaaattcctctaccagacgatttgccagaatttcctcagaagtaaatgcaaggaacggattgcggaaggtaatggacggatcgtttaattcgtctacgttattcttgatattttcggcatatgaggtaacgatcgggcagttatagtggttgactgcatccgggaactcgttacgttcatatgggatacatgggtagaaaataaatttcacgccattgcggatcagccaggttacatggccatgtgcgagcttggcagggtagcattcggactcacttggaatggactcaatacccagctcgtaaatctttctggtggaagtaggagagagaacaacctcatacttcagttctgtaaagaaagtataccagaaaggataattctcaaacatgttcagaacacgggggatacctactttacctcgcgttgccttatcagcagtaagcggtgcgtaggagaaaatacgcttatatttatattcataaagattcggaatatgatctttgttcttttccttaccgataccgcgttcacagcggttaccgcttacatactggcggccgccggagaatttgttgatagtcagacggcagttattggtacatccacgacagtttgccatagaagttgtatatttcagctcgttgatcttatcaatggagagcatagtcgtttctgcgccttcctgatggcgttcacgggcaatcagtgcggcaccgaaggcacccatgattccggcaatatccggacggatggcttcgcagcctgcaatcttttcgaagcttcgaagaaccgcatcattgtagaaggtaccaccctgtacaacgatgtgtctgccaagttcggaagcatcagaaaccttaataaccttatagagtgcatttttgataacagagtaagcaagacctgcggaaatatcggatacctcagctccttctttctgtgcctgctttaccttggaattcatgaaaacagtacatctggtaccaagatctataggatgctgtgcaaaaacagcagcttttgcgaaatcctgtactgtataattcagggatttggcaaaggtttcaataaaggaaccgcatccggaggagcatgcttcatttaactgtacgctgtcaacggtcttgttgcggatcttgatacatttcatatcctgtccgccgatatccaggatacagtctacctccgggtcaaaaaacgctgctgcatagtaatgggatacggtctcaacctcgccctcatccaggatcagagcagccttaatcagagcctcgccgtaacctgtagaacaggaataagcgatctttgcgtctttgggaagcagttcatagatttctttaatagaacggatggtagtttttaacgggtttccgttgttgctgctgtaaaaggaatagagaagtgttccatcttcgcctaccagtgcagttttggttgtggtggaacctgcatcaatacccagatagcagtttcctttatatgtagccagatctcctgtttttactttgtaggaactctgacgttttgcaaatgcatcgtattcttcctgagacgcgaaaagtggttccatacgttctacttcgaaatccagcttaatggaattgcggagtctgtctttcatttctgtcagggaaatggagttgtcttcttttgcatttaatgcagaaccgatggctgcaaaaagatgggagttctccggaatgatggtgtgttcctcatccagcttcaaagtacggataaaggattctctcagttcggacaggaagtgaagcggaccacccaggaatgcaacatgtccacggataggttttccacaggcaagaccggagatggtctggtttacaactgcctggaaaatagaagctgacagatccggtttggttgcaccgtcattaatcagcggctggatatccgttttggcgaaaacaccgcagcgtgcagcaatcgggtagagtgctttgtaatctttggcatattcattcagacctgtggcatctgtctggagaagagaagccatctggtcgatgaaagaaccggtaccgcctgcacagataccgttcatacgctgttctacgtttccgttttcgaaataaatgatcttggcatcctcaccgccaagctcgatggcaacatctgtctttggtgccagcttctgcagagaagtagaaactgcaataacctcctgggtaaaaggaacgcccagatggttggcaagggtcagaccgccggaacctgtgatcacaggatggagagtcatctcgccatactggtcaaaggcctcctgaagaaggtctgcaagggtttcctgaatgttcgcaaaatgacgcttgtaatccgcgaaaatgagattttcattctcatctaagatcgcgatctttacagtagtggaaccaatgtcaattccaagtgttttgtaattcataaagtaaattcaagcctcctcgtattgtatataaacaaaattgaaattttcctgttactgttcacacaccactatcccgcgaagtgttttggcatgaatatgccaaaatcccgagacatacaagccaaaattccattgccgcaggcaatctggaatgaattttggctacgttactgagaacggagtgaacagtaacattttctttactgtttgctgctgatatcatgcaaagcgtgttgccggacacgaagtaaacagtaaaaatctatcctgttctttcctattaaatatctgtttccagatatggaatattccgtaatattatacgctaatggtctggaaaagacaatatgaaagtttaccaatgattaccttatttgcagttgaaaattcagctatttcgggatataatagaaaaagtgatttttatcaagaggagagaaaaaatggcagaatataaacttcttaaaacagaaggccgtgccaagcgtgcagaatttcatacagtgcatggtacgatccagactcctgtttttatgaatgtgggaacgatcggtgcgattaaaggcgctgtatccaccatggatttacagcagatcggaacacaggtagaattatcaaatacttatcatcttcatgtgcgtccgggtgataaaatagtaaagcagttaggtggccttcataaatttatggtatgggacaaaccaatccttacagactcaggcggattccaggtattttcccttgcaaagctgagaaagatcaaagaagagggggtttattttaattcccatattgacgggcataagatctttatgggaccggaagagagtatgcagatccaatccaatcttgcctccaccattgccatggcatttgatgaatgtcccagcagtgtggctgacagggattatgtgcagaaatctgtagacaggaccacaagatggcttgcccgctgtaaagcggaaatggcgagactgaacagtctgccggataccattaacaaagaacagcttctgtttggaatcaaccagggtgctgtttatgaagatatccgtattgagcatgccaaagcgatctctgaaatggatctggatggctatgctgtcggcggtctggcagttggagaaacccatgaagagatgtacaggatcctggatgcggtagtcccctatcttcctcagaataaacctacttacctgatgggtgtgggaacaccggcaaatatcctggaaggtgttgaacgtggtattgacttctttgactgcgtatatccaagccgtaacggccgccatggacatgtatataccaatcatggaaagatgaatctgtttaatgcaaaatatgaactggacacacgtcctatcgaagaaggctgtcagtgtcctgcatgccagcattacagcagagcctatatccgtcatcttctgaaagcaaaggaaatgctgggaatgcgtctctgtgtacttcacaatctgtatttctataatcatatgatggaagaaatccgagatgctcttgatgcaggaaacttcgcagaatataagaaaatgcggctggaaggctttgaagagggaaaaattaactcgaaaagataatctgtatataaaataattattaaatatgccaaaaactcttgaagtaaagcggttttttgtgtatgatgtgtagtgacgctttaatcagattgttctgcatgaaaacaagatttcatacagaaggtaacggagattataagtggatcgcaaagcagctcttcagtatgagcagccgtcaggacggtctgtgaatacatgatggactgcaaatatgcagaataacaggaatagttacaggaggaatcaaaatgaacgcatcaagcggaatgggtatggttggcgctattgtctggatggtagtactgttcggaattatgtacttcttaatgcttcgccctcagaaaaaagagcagaagagacttcaggcaatgttaaatgacatggaagttggcgacagcattgttactaccggcggcttttatggcgttgtcattgacatgacagaagaagacgtgatcgtagaattcggtaacaacaaaaactgccgtattccaatgagaaaacaggcaatcgctgaagttgagaaagccggaagcgctgccgaataatgaaagagatatgaaaaaagcggaacctatagtcagtgatggctgtggttctgtttttttatttttacagtaaaatctccggaaaacagcacttttgtattttttcactttaataggttgaaatctgtcggaaagtgcgttattataataacaattacgcaattagagtatttttggaggaaattattatggattataagattgcattgatccccggcgacggaatcggaccggaaatcgtaagagaagcaaagaaagtactggacaaggtatgcgagaaatatggacacagcttttcctattcagaagttctgttaggcggcgcatccatcgatgtacacggcgtaccccttactgatgaggcaattgccactgccaaatcatcagacgccgtactgatgggctctattggcggagatgcaaaaacttctccatggtataagcttgagccgtccaaacgcccggaagcaggacttcttgcaatccgtaaggcattaaatctttttgcaaacttaagaccggcttacctttacaatgagctgagaaaagcctgccctctccgcgatgagatcatcggagacggatttgacatgatcattgtacgtgagcttacaggcggtctgtatttcggagaacgtcagactattgaagagaatggtgtgaagaaagcaattgatacactttcctataatgaaaacgaaatccgccgtattgccatcaaagcatttgagatcgcacgtaagagaagaaataaagtaacaagcgtagataaggcaaatgttctggattcttccagactctggagaaaagtggtagaggaagttgccaaagactatccggatgttaccttagagcatatgctggttgacaactgcgcaatgcagcttgtacgtgatccaaaacagttcgatgttatcctgacagagaatatgttcggagatatcctttcagacgaggcaagtatggtaacaggctccatcggaatgctttcatctgcaagcttaaatgagacaaaattcggtctctatgagccaagccatggttctgcacctgatattgcaggacaggataaggcaaaccctatcgcaaccattctttccgcagcaatgatgctccgcttctcccttgatatggataaagaagcagatgcagtggaagcagcagtgcagaaagtcctgacagagggataccgcacaggcgatatcatgtcagagggatgcaaacttgtaggaacaaaagaaatgggcgatctgatcgcagcagctctgtaagaattgatattaagaggattcagccggcgcaggcagattacggagtcaggaatttcggttgaatcattaaaaataaataaaacagtaagaaaagaggaaataaaacaatgagaagtgatgcagtaaaaacaggcacacagcaggcacctcaccgttccctgtttaatgctcttggaatgacaaaagaagaaatggacagacctctggtaggtatcgtaagttcttacaatgaaatcgtaccgggtcatatgaaccttgacaagatcacacaggcagttaagcttggtgtggcaatggcaggcggtacacctgttatgttcccggcaatcgcagtatgtgacggtattgcaatgggacacgttggaatgaaatattctctggtcaccagagacctgatcgcagattccacagaagcaatggcaatggcacatcagtttgatgcactggtaatgattccaaactgtgacaagaacgtacccggacttctgatggcagcagccagactgaatgttcctactgtattcgtaagcggcggtccaatgcttgccggacatctgaacggacacaagacaagcctttccagtatgtttgaggcagtaggtgcttacgcagcaggcaagcttgatgaggacggactgacagaatgcgaaatgaagacatgtcctacatgcggatcctgttccggtatgtacacagcaaactccatgaactgtctgacagaggttcttggtatgggtctgaaaggaaacggaaccatccctgctgtatattccgagcgtatccgtcttgcaaaacatgcaggtatgcaggttatggaaatgtacagaaagaacatccgtccaagagatatcatgacaaaggaagcaatcctcaatgccctgacagtagacatggcacttggatgctccacaaacagtatgcttcatcttccggctatcgctcatgagatcggaatggactttgatatcagttttgcaaacgagatcagcgcaaagactccaaacctctgtcaccttgcacctgcaggcccgacatacatggaagacctgaacgaagctggcggtgtatatgcagttatgaacgaactgaataagaagggacttcttcatactgagtgcatgacagttacaggcaagacagtaggcgagaacatcaaagactgtgtaaacttaaatcctgaagttatcagaccgatcgacaatccatacagccagacaggcggacttgcagttctcaagggtaaccttgcaccggacggcggtgttgtaaaacgttctgcagttgtagaagagatgatggtccatgaaggacctgcaagagtctttgactgcgaggaagacgcaatcgcagctatcaaaggcggcaagatcgtagagggtgatgtagtagttatccgttacgaaggaccgaaaggcggccctggtatgagagagatgctgaaccctacatctgcaatcgcaggtatgggactgggatcttctgtagccctgatcacagacggacgtttcagcggtgcatccagaggagcatccatcggacacgtatcaccggaagcagcagtcggcggaccaatcgcacttgttgaagaaggagatatcatcagcatcaacattccggaactgaaactggagatcaaggtttctgatgaagaaatgcaggcaagaaaagcaaaatggcagcctcgtgagccaaaggtaacaacaggatatcttgcaagatatgctgccatggtaacctccggaaacagaggagcgatccttgaggtaccaaaagcaaaataaagatgaacaagtacccggcgggaattgcggcataacctgtgattcctgcctgaaaagttaggaggatacgtaaagatgcagcttacaggtgctgaaatcatcgttgaatgtttaaaagaacagggcgttgacactgtattcggatatccgggcggtgccatcctgaatgtatatgacgccctctatgaatataaagaccagatcacacatgtactgacttctcatgagcagggagcatcccatgcagcagacggatacgcaagagcaaccggtaaagtcggtgtgtgtcttgcaacttccggtcccggagctaccaatctggtaacaggaatcgctaccgcatatatggattctgtaccaatggtggcaatcacatgtaacgtgggaacaccgctgctcggaaaggattctttccaggaggttgatattacaggaattgtaatgcctattacaaagcacagctttatcgtaaaagacattactactctggcagacactgtacgcagagcattctatattgcaaagagcggacgtcctggtcctgtgcttgtagatgtgaccaaggatgtgacaggtgcgaaatatgaatatactgcctgcgctcctgctgagatcacaccgaaaacagacaccatcaaagacgaagacattgcaactgcagtacagatgattaaagaagcgaagagaccatttatttttacaggcggcggtacgattatctcagaggcatccagagaagtgacagaacttgctcacagaatcgatgctcctgtatgtgacagtcttatgggtaagggaggattttccggagaagatcctctgtacacaggaatgcttggaatgcatggaacaaaaacttccaacctcggtgtctcaggctgcgatctcctgatcgtgctgggagccagattcagtgatcgtgtcacaggaaacacaaagacctttgcaaagaatgcgaagattctccagattgacgtagatgctgcagagattaacaaaaacatcgtagtagatgcaagcgtagtaggagatgagaaagaagttctcaaacgtattctggcagaggttccggaaatgagacatccggaatggactgcacatatcagtgaactgaaggaaaaatatccgttaagatatgatcattcccagcttacaggcccatacattattgaaaagctgtacgaactgacaaaaggagatgccatcatcacaacagaggttggacagaaccagatgtgggcagcccagtattttaaatacaaagagccaagaaccttcctttcttccggtggcctgggaacaatgggatatggtcttggagcagccatcggtgccaagatgggaagaccggacaagactgtggtaaacattgcaggtgacggctgcttccgtatgaatatgaatgagatcgcaacagcagtacgctgtggcagacctttaatagaaatcgtattgaacaatcatgtactgggaatggtacgtcagtggcagaccctgttctatgaccacagatattcccatacaattttaaatgatgcagtagattttgtgaagctggcagaagccatgggagcaaaagcaatccgtatcacaaagatggaagaggtagagcctgcattaaaagaggctctggcatgttcgggacctatcgtacttgactgtatgatcgatcaggatctcagcgtattcccgatggtaccggcaggcgcaagcattgatgatatttttgacgaggaggatatgaaaaacaatgagcagagtgtataatttttccgcaggaccggccgtattgccggaagaggtactgaaagaagtagcagaggagatgatggactatcagggatccggtatgtctgtaatggaaatgagccacagaagtgctgatttccagaaaatcattgacgaagcagagcaggatcttcgtgatctgatgaagattccggataactataaagtattattccttcagggcggagcttcccagcagtttgcagcaatccctatgaaccttatgaagaacaaggttgctgattacattgtaacaggacagtgggcaaagaaagcatatcaggaagcacagaaatatggaaaagcaaacaagatcgcttcttccgaggataagactttctcctatattcctgactgcagcgaccttccgatcagcccggatgcagactatgtatacatttgtgaaaacaacacaatttacggaacaaaattcaagaagcttccgaatacaaaaggaaaaactctggtagcagatgtttcctcctgcttcttatctgagcctgttgatgtatccaaatatggcatcatctatggcggtgtacagaagaatatcggacctgcaggtatggtaatctccattatccgcgaagatctgatcacagacgatgttctggaaggaacacctactatgctgaaattcaaaacacaggcagacgcaggttctctttacaatactccaaactgctactgcatctatgtatgcggtaaagtcttcaaatggctgaagaaaatgggcggactggaagaaatgcagagacgtaacattgagaaagcgaaaatcctctatgatttccttgatcagagcaagcttttcaaaggaactgttgtaccggaagaccgttctctcatgaatgtaccattcgtaacaggtgacaaggacatggatgccaaatttgtaaaagaagcaaaagaggcaggacttgtaaacttaaagggacaccgtacagtgggcggtatgcgtgcaagtatctacaatgctatgccaaaagaaggtgtggaagcactggctgctttcatgaagaagtttgaggaggagaatgcataatgtttcagtatcattgcctgaatcccattgcagaaaaaggtctgggattatttgatgaagaatataagaaaagcgaagatctgcaggagtgcgatgcagtccttgtaagaagtgcaaaaatgcatgacatggagcttcctgagagcgtaaaggtaatcgcacgtgcaggtgcaggtgtcaacaatattcctgtaaaggactgtgcagagaaaggtgtggtagtatttaacacaccgggcgccaatgcaaacggtgtgaaggagcttgtacttgcaggtatgctccttgcttcccgcgatatcgtaggcggtatcgaatgggttgccaaagagaaagaccaggaagacatcgataaacttgctgagaagcagaagaagcagtttgcaggatgcgagatcatgggcaagaagctgggtatcatcggtcttggtgccatcggagcaatggtggcaaacgctgcttctgcacttggaatggaagtatacggatatgacccatacatttctattgatgctgcatggaatctttcccgcaccatcaaacatatcaagagcctggatgagatttattcccagtgtgattacatcaccatccatgtacctcttcttgacagcacaaaagagatgatcaacaaagaagcattagacaagatgaaagacggcgtagtacttctgaactttgcccgggatcttctggttgatgaggatgctctgattgaagcattggacagcggaaaagtaaagaaatatgtgacagactttgcaaaccatacagtagcaggacataagggaatcctggtaactccacaccttggagcatctacagaagaatccgaagaaaactgtgcggtaatggctgtaaaagaagtcagagatttcctcgagaacggaaatatcaagaactctgtaaacttcccgaactgcgacatgggaacctgcgtagcagtaggacgtatcgccatctgccacaaaaacatcccgaacatgatcagccagttcaccaagatccttggtgcagaaggcctgaacatcgcagatatgacaaacaagagtaaaggcgaatatgcttatactctcattgatctggaaagcgcagcatccagagaagcactggatgaactgaaagcaattgaaggtgtttccagagtacgtgtggtaaaatagtaagatacaagttaacggtttagtatttttataatgactgactgttgatttgtaatagagatttatatatttaaaatatctcctgtctgattgagattttcaatcgccaggagatattttttgatttttatgataaaaaaaggaagcccagtctggcggtgccagagggcttccttaaaaaattatgatgttaaatcagcatcctcttgatttcataaagtcaagaacctcttctttggtggacataacgcgaagagcacccttgcgtgtggtgatcagagaagctgccgcatttgcgaatgtgagcagttcttttaagttctcttctgtcagattgtccagaccatgttccagaacatagtttaaggaacttgcgcagaaggtatcgcctgcacctgttgtctcgatagtcttttcctgaaggaaaggagcagcctctactttcatgtctttgtagtaagcgcggcttccgtcttttccaagtgtgataaggataagaggaatgttatatttctctttcagaagtgcggcacccttgtcatagtctgtagttccgaacaggaattcaacttcgttatctgagattttcagaatatcgcatttgccaagaccgtattcgatctctgcctttgcgtcatccagagatttccataatggcgggcgaaggttcgggtcgaagctgatgatacatccggcttcttttgcaacgtcgatggcatagcgggttgcctcgcgtactccttcgtgagtggaagaaagtgttccaaagtggaagattctggaatctctgatcaggtcttcctggatttcgtctttggtaagcatcatatctgcacccgggttacggtagaaggagaaatctctgtctccgtcaggataagtatgtacaaaggcaagtgttgtgtgtacctcgttgtcgatcacaaggttgcgggtgtcgattcctacttcctctacggcattcttaagctgggttccgaacatgtcgtttccgactttgccgatgaatgcagtttttttgccaagcttctcaagcattgcaagcacgttgcatggagcaccgcccggattggcttccagcattggatttccctgtgcgctgtttccgttttcagtaaagtcaatcaataattcgcctaatgcggttacgtcaaaggctttgtttcccattttgtatcctccttgttgtgatggaaagaagcatagtatccggaacaagattctttccatagttaataacataaatttagcgcaggaaagggaatttgtcaaacaattttctttatttttttgtgcaaagatgctaaaataaacataacttgatttgttattgtttacaggtgacgtttaatgtaccataaatacgctgccggtaagagtaaccgatcatcgtatttctgacaatcggggaggtagcacagctatggacgaaaaagtatacggctatatggactggccgaggattgaagctattgtgtatggagaggaaactgctcccagagatgtgatgggaccaaggatcacacaggacggagttcttattcagggattttttcctgatgcagaggaagtaagtgtgatcagcggaaagaaaacctatgtctgcgagaaagaagacgaggccggatattttgcagtattgcttcctgtacgcaaggtgccggaatacagatttcttataaaaatgggagagacagagacagaatgttatgatccctatgcttttccatgccagatcacagaggaagaggagaaggctttctgcgcaggtgtttattatgaggcatataagaagctgggcgctcatcctgtggagattaaaggagtgaaaggtactctttttgctgtctgggctccgaacgcagtgagtgtaaatatcgcaggtgattttaatggatggatcggacgtgcgactattatgcatcgtatgcctatgtccggtatctttgagctgtttgtacccggggtagaggcagggatacattataaatatgagattaaagtcaaaggcggcgaagttctgttaaaggctgatccttatgggaacagtgcagaccatgatcctgagggagcatctgtggtagcagatgtaagtgcttttcagtggaatgacggagactggatgaaagagcgtcacagatttgatgacaggaaacagccggtttctatatacgaaacatctctggaggaatggaaatccgctgaggagctggtggaatttctggcagaggaagattttacccatgtggaactccatcctgtgatggaatacctggatgatattacaggtggttattctacatatgcatattatgcacctacttccagatttggaagcgtggcggattttcagaagctggtagatgaactgcatcaggcaggaatcggtgtgatcctggactggacacctgcacagttcccgcgttatgcctccggtctggagaaatttgacggaacacctctttatgagagacagaatccggcagaggccattcatccgttctggggaacattgctctataattacggaagcccgatggtgaaggacttcctgatttccaatgcctgcttctgggctgaggtctaccatgctgacggtctgcgtatggacgatgtggatgccatgctgtatctggattatggcagaaatccgggagaatggacacctaatatttacggaaccaatgaaaatctggatgctctggaatttctgaagcatctgaattctgtgataaaagagagaaatcccggattgcttttagttgctcaggagaacggactctggccggagctgacagacagtgtggagaatgaccatctgggatttgactataagtggagtggcggatggacaaaagatctgcttgaatatctgagcaaggatcctattgagagaaagaattaccatgatcagctgactatgtccatgctctatgcatactgcgaacattatattctgacgcttggcagcagggatgttggtacattgaaggatttcgcggataagctgccgggaagtgaagaacagaagaatgcgcagatcagagaggcttatgcttatatgatgcttcatccgggatgcaagatgatggcaccggataaagatatgccaaaggaactggaagtatgtgtcaaagacctcaataatatgtatcttgctcatcctgcactttatcagctggatgatgaatatgatggatttgaatgggttcagctgatgaagtatgaggagaatgtgatcgcattcatgagaaagacagagaaaccggaagaaactattctggctgtctgcaatttcgcggcaatcccatatgaaaactacaatgtgggagttccttttgccggcaaatataaagaaatctttaacagtgatgataaaaagtacggtggtaatggtgtagtaaatacgagagttaaagcggcgaagaaggctgagtgtgatgagagagagtattccatcacattgaagcttccggcacttggcgtggcagtctttacctgcacaccggaagaaactgagaaaaagcctgctgccgagcacagccagatcaagaaatccatcaccaagacaagaactgtacgaaaggctgccgggaaaacaaaagcagctgtaaaaaccgcagtgaaaccggtgacgaaaacagtatctgaaataccggtcaaaaaggacttgacagagaagaaataatattataaactaaatgctgtggctgtcagaattatcaatttctgacagattacagcataagctgaaatagctcagtcggtagagcacttcactcgtaatgaaggggtcgtgagttcgagtctcattttcagcttgaaagatattgggcaattgtaattttatagaaaatccgctatactgaaaagcagagtatagtggattttttatgtttttatggaagttcgtatggtgagtaccttaaaattgctggtaggaattgaaatgattggttactgttcactggtaatatcccgcgaggtgttttttgtgagcgaaggtcacagaaaacccgagacatactgcgcgaatttatgcgattagcataaattctgtgcatcgtgaagcgtgttgctgagaacggagtgaacagtaacaatgattgtaaagagaaatttacttgacaatctcgggcctatcctttaatataacttttggattataccaaataaataatgaccgggaatctatcaagaagaatggttgatttccggttttcttatgtggacatcatggtcaggagtgcacgcagactggatggaacaaaaacggaccggatatatctataattggaaaaatggacatatacagatgcgaaaccatgcagagactggcactgtaacaggcgtcagcattggcataaaccgatgtaggggcgagagcttttacgcgtggtttcgtatcttttttagtataaagaggtatcttttttacatgaaaggagctgaatatagttggcagaggtttcacttgaactgaaggagataaagaaaagttttacagaaggcgaagcagttctggataatatcagtcttgagatcagtaaaggagagtttattactttgctgggatcttcgggatgtggcaaaacaacaacacttcggatcattgccggtctggaacagcccgatgcaggaagtgtctggctggacggcagggaagtgacaggtctggagccgaaccagagggatgtgaatacggtatttcagaattatgcgctctttccgcatatgaatgttgcggagaatattggctatggtctgaaactgaaaaaagttcctaagagtgagattaggaaaaaagtttctcggatgctggaactggtgcaacttgaaggatatgaaaaaagaaagccttccgaactctcgggcggtcagaaacagagagttgccattgcgagagcactggtgaataatcccaagatactgcttctggatgagccgctgggagcactggatctgcagcttcgtcgtgcgatgcagatagaactgaagcatctgcagaagaaactgggaattacatttatctatatcactcatgatcaggaagaagctatcaacatgtctgacaggattgcggtgatgaaggacggacgtattgagcagatcggaacaccggatgagatctataatcatccaaagaccagttatgtggcaacatttgtaggaaatgccaatatcctgcatggggttgcagagaatattcagggagagaatgcaatcgtaaagattggaaatgacagggtaattgtaaagcttgaaacaagtcagcaggatacaggggatacaagggcaaaacaatacctggcagccggagaaaaagtaactctggctgtgagaagcgaaaatatattgttacaggaaactgctgtaatcggtgataccggtacagattacagagacgctgttgacataagtgtggcagacggaagtttggatgcacataataagaatagtgtatcaagtttacaggcgactgttacagagaagaactttgcaggaggtcagcttcgtgtaactctgaagctgagtgatggtacacagttgatcgccagcagatacggaatcgacgcatccgtagcagaaggacagacagtaagatgcagtttcctgccgacagatgcagtactggtagacagggaggacattcatgaagaagcgtagaaaccgttctgacagttctgcatggatggcacttccactgtacatttttactattgtgtttgtagtatgcccccttatctatatggtggcgctgagttttgctacgccgtccagaggatttggggtgacctggaaatttacgctggacaattacagaaatattctggaacctgtatacctgaatacatttgtggaatcactgaaactggcatttaccagtacgatagtgattgctttgatcggctatccgttcgggtatttcatggcgaggctgccggagcacagaaagaaaaaggcacagcttctgttgtccacgccgttctgggtaaattccctgattcgtctgtatggctggatcattattctgcagaaaaaaggacttttgaattttgtattgataaaactcgggatcattgagaaaccgctgtccatcctgtacagctatccggcaattgtgatcggtatgatttatgtgcttctcccgtttatgatcatgtctgtatactccagcgcagagaagctggactggtcttatgtggaggctgccagagatcttggggcatccagactgcaggcattttttaccataacactgaagcttacactgcctgggctgctttcgggtgtgatcctgactttcgtgccatccatgggactgttctttattgcagatattctgggcggaaataaagtggtacttgtgggaagtctgatccaggatcagatgacaagaggaagtaactggccctttgcagcagcacttgctgtggtgatgatggtacttacaactgtactgatcatgatctacaggaaagtgacaaatgccggagaactggagggaatcggatgaaaaagaattcaagatttgccggattttatatggggctcattttctttctgatgtatctccctatcgcggtagtgatcgtgttttcatttaatgaatccaaactgccggtgaaatttacaggcttttccctgaaatggtatcaggaacttttccatgacagagcaatgctggaagcactggtgaacagtttgattcttggtgtattaagctgtctggcaagcgcagtgatcggcactctgggcgcagttgggttatcaaggattcactggaagtcaaaaggggcactggaatacatttccatattgccgttaatgataccggagatcattcttggtatggtgctgatggcattcttttatatgctgaatctgccctttggcatgctgacactgttaataggccatacggtattctgcgtgccttatattctaatggaagtgaaggcaagactggcaggcatggatccggcactggaagaggcagcaagggatctgggtgcgggaccgttcagggctttccgggatattacgctgcccttaattatgccggcggtaatttcaggttcgctgcttgcgtttgccatgtctatggatgatgtggtaataagtatttttgtaaacggaccgcgtctgtctacgctgccgatcaaggtgtacacacagctgaaaacgggagtgacgccggagatcaatgcgttgtgtaccattctgctggcagctacactggttatttttattgtttattcactgataacaaagaagaaaaaataaatgctatagcaacaaaaatagaatacattcagaggaaggaaaagatgatgaacaaactgattgagttaaaaaatctgaccaagaattttgatgatcagcaggttttgcgcggcatcaatctggatatttacgaaaaggaattcctgacgcttttgggacccagcggatgcggaaagacaaccacccttcgaatcattgcaggctttgaagaaccaagtgacggagaagtactgtttaacgggattgagatttccaagcttcccccgtacaagagagaggttaatactgtgtttcagaagtatgctctttttcctcatttaaatgtggcggagaacatcggtttcgggctgaacctgaagaaagtcgataaaactgtcatcgcccagaaggtggagcgtatgctgaagatggttggtctggaaggctttgggaaaagagatgtaactctgctctccggtggacagcagcagcgagtggccattgccagagctctggtaaatgagccgaaggttctgcttttagatgagcccctgggtgcactggatgcaaagatccgtaaacagatgcaggtagaattaaagaagatccagcaggaagtcggcatcactttcatttatgttacccatgaccaggaagaagccctgtccatgtcagatacggttgttgttatgaataacggtgagattcagcagatcggttcgcctacagatatctacaatgagccggaaaaccgttttgttgcaggctttatcggtgaatctaatattatcgagggaaccatgatccatgattatctggttgcttttgacggatttgagtttgaatgtgtggataagggatttgaagataatgaagagattgaagttgtattaagacctgaggatctggatatcgtagatcccggtcaggcaaagatcaggggaatcgtgcgcaatattaccttcaagggtgtgcattatgaaatcctgatcgagacagagcttcgtacttatatggttcataccacagattatgcggaagtcggaagggaagtgggactgaaattcgggcctgaagacatccatgttatgtgtaagatgggaagctactgatgaaacagtacagaaatcttatcaaaccatatcttgtgtgggcatttgtggtcattgtcatcccgctgattttgatcgcattatatgcatttacagaagatggaaacgaagtgctgacgttctccttcaccctggagaatttccgcaaattcctggaagctacgtatatgagcgttattttcaagtcctttaagcttggaattctgacgacggtcatctgtctggggcttggctatccgctggcatatattatttccaaatgtccggagaaatcccagagtcttctgatcctgctggtaaccattccggaatggatcaatatgcttctgcgtacttatgcatggatgaacctgctgtcggacaatggtatcatcaaccatttgcttggattactggggatttccccggtgacaatgatgtatacagacttttccgtagtggttggtctggtctgtaactttatgccatttatgatcatcccgatccacacatccctgagcaagatggataaatcctttatcgaggctgcctatgacctgggtgcaaataaattccagacctttacaaaggttatctggaaattgtccatccccggcgtgctcaatggaatcatgatggtattcctgctgtctatttccacattcgttattccgaaacttctcggaggcggacagtacatgatgatcggtaacctgatcgagtctcagtttatctctgttggcgactggaacttcggaagtgcgatttctctgattctggctgtgctcattctgatctttatgagcctgatgaagaagatggataaagatgaataagggaggacggcatgaaacgtaataataaatttttctcaatgttatatgtagtactctgccttgctttcttttacctgccgatcctggtgacgatgatcttttcctttaactcatccaagtcactgaccagatttacaggcttttccctgcgctggtatcaggaacttctcggtaacggggaagtaattaaggcagtttatgtatctgttaccattgcgatcattgcgaccattgtttctacaatacttggaaccattacagcgatcggtttatccaaatcaaagaaggtaatcaaggaactgcttttgaatattaataatatccctattctgaatcctgagatcgtaactgccatcagcctgatgctgttgttctcttctctgggatttcgaaaagggtatctgactatgctgctggcacatattgcgttctgcaccccgtatgtaattaccagcgtttatccgaaggtaagggctctggatccgaatatggcaaatgctgccatggaccttggggcaacaccttttcaggctctgacaaaggttatcgtgccgatgatcaaagagggtattttcgcaggcgcgctgcttgcatttaccatgtcatttgatgatttcgttatttcctatttcgtatcaggaaatggtgtaaagaatatctctattgttgtatataatatgacaaagcgtatcaatccgacgatcaatgctttgtcaaccatcgtgatcgtagtcatcatcgtggtactgcttttgtccaatctgcttccgaagtttaagaataaagccagaaagctgaacaggaaagcagtaaaaattgtctctgtagttctggttgttgccgttacggcagggctgatcaaatggggattcgtggcgcagtccactcatgtgctgaaagtttacaatgcaggagagtacatggatctttccctgctggaggatttcgaaaaagaatatgattgtaccatcgtatacgagacttttgagtcaaatgagatgatgtacaccaagctttcaagcggtgagacttatgatgtgctgatcccgtctgattacatgattgagcgattgatcaaagaagaatatctgcaggcacttgactggaaagaaattccgaataagaaaaatctgctgaatgatgtcatgaaccagagctatgatccgggcaaccgttattcctgtccgtatttctggggaacagtaggaatcctttatgataagacagtagtagatgaggctgatctgaaagatggctggaatcttctgtgtaatccgaaatataaaggaaatatttacatgtatgattctgagagggattcctttatgatagcattaaaagcacttgggtattccatgaatactacaaatgagtctgagatcgaggaggcttatcagtggctgatcgatcagcgtgacactatggatccgatctatgcaggcgatgatgtgatcgacaacatgatttcaggaaacaaagcgctggcagttgtgtactccggagatgcatcttacattatcagtgaaaatccgaatctggactactttacaccggaacagggaaccaacagatggtatgatgcaatggttatcacaaaggactgcagcgaagtacagcttgcccatgaatttattgattttatgatcagtgataaatctgctctttccaatacggaagaagtagggtatacttctacagtgaagagtgcttttgaaaccatgaaggagggggactatgccggaatcagttcttatattccggatacaaccaacccgaataacgaaatctttgcttatcagcagccaaagatcaagcagaaatttgcggaactctggacaaaagtaaaagcaaagtaaaaaaggatagccgctgtctgccgatacggtggaaggcggacagtgactgatatagacaacaatgcagagcataagaagggagatcatttatgaaaaaaagagtacttgcagtagtgatgtgtgcattaatggcaggaacagcattcaccggattcaaggatgcaggagatgataaagaacttgtactttttacatgggagggaatgttcccgcaggaagttctggatgattttgaaaaagagacaggagttaaggttgtttattcaaacttcgatacagatgaaaccatgcttgagaagctttccatggcaaagggcggtgactatgatatcgtgatcgcagatgactatattctggaaactgcgatccaggaaggacttgcagagaagcttgacaaggattctctggagaatatcaaaaatatcaacccattatatcagggacagttctatgatccagacgatgaatacacagttccttacggagcaggcatcccgctgatcgtttatgatccggaacaggtggatattgatatcaaaggatataaagacctctgggatccgtctcttgaggacagcattgcactgactgcaaactatcgtgtgctcaatggtatcacccagctttccatgggcgagagcatgaatgaagaggacgttgacgtgatcaagaaaacaggagagaagcttctggaacttgctccgaatgtacgtctgatccaggatgacaatacacagaatgcacttctcaacggagaagcaagtgttgcatttctttatacctctcaggtaacagctgctctggctgagaatcctgatctgaaggtggtatatccggaagaaggacttggatttggtattatgggtatgtttattccaagtgaagcgccggataaagatgcggcatattctttcatggattacatcatgcagccggaggttgcagcgaaatgtacagactatatcggctattacagcacaaataaagcagcagatgagctggtaaatccggatctggtagttccggatgacgttacaaagggcgagatcgtccagaatgtaagccaggacgcagacgcacagtatcagaagaactggactgaatttaaggctgcctgcgactaaggggttaatcaactaaggagttaatatggatgtttacaagggaaccggtgccttttccggaattgccatcggtaagatactgtattatcataaaagcgaatatcagatgcgccagtacgagatcacagatgtgaaaacagagctgaatattttccggcaggcgcgcaccagagtcatggaacagctggaggatttatatgaaaaaaactgcataattcagggaacccaggcagagatttttctcagacaaaagaatctgctggagggaaaaagctttcaacgtgccattgagagtgtcatacagagtgaaaaagtaaattctgcctatgcggtaatgactacaagggatgagatgcttaagactttcagaactctggaagagcctgcgattaaagaacggctggataatatgcgggagatttccgaccgcctgatcggtgaactgggaggtatctctcccaggatagatcttggggatgagcctgtgatcgttgtgacggagagtattacgccaacagaactgatggagatggataaggataaactgatggctattgttacccatcatggttccgacatgtctcatgctgccattatggcaaaaacaatgaatataccggctctgctggaaattgacacagattcggagtgggacggacggcaggctattgtggacggatataccggaactttgtatattgatccggatgaagaggtaaaaaaagaatatgagatccgcaggcaggctgataaagaagaaagagaagagcttctgaaattaaggagagaaccggatatcacaaaagatggcagaaaaattgaaatctatgccaatatcggaaatatggacgacctgaacagtgtgctgtattacggagctgccgggattggtcttctgcgcagtgaattccagtatcttggaagagaaaattatcctcgtgaaaatgagctgtttcttgcatacaaaaagattgcggagaccatgggagaaaagctcactgtgatccgtacggcagatctcggagcagacaagcaggcagaatatctgaatatcccggacgagacaaatccgatcatggggaacagaggaatccgtctctgccttgacagaaaaagaatgttcaaggcacagcttcgggcaattttcagggcgagtgcatatggaaatctggcgctgatgtatccgatgatcagctcagaagaggaaatggatgagattgaagaaattatccgggaagtaaagatcgggctggatgaaaaaggaattccgtataaacatattaagacaggaatcatgatcgagactccggcagcagtcatgatcagccgggagcttgccagaagagtggatttcctgagtcttggaaccaatgacctgagtcagtatacactggcgatggacagacagaatccgcttctgcgcaagaaatataatgaccatcacccggcagtgctgcgtatgattcaaatggtgatcgaagcgggacatgcagaaaatagacgtgtctgtatctgcggggaacttgcagcagacactgccctgacagaagaatttctgaggatgggtgtggactgtctctctgtagtgccggcatgtattttgccggtaagaaaagcactgagacaggtggatctgtccggagatgataaaggtgcgtgaatttggtgaaaagtaaagtggtattacttccctgccgggaatatgatgaagaaaaaatctatatgctgctgaaacaggggctggattttctgggtggagtggagactctgattccaaaggatgcgaagatcctgctgaagccgaatctgctgaaaaaagcagaggtagagaaagcagtgatcacacatccggttgtagtaggagtttttgcgggaatcctgcgtgaaagtgggtatgagaatattgtgcttgcagattcctgcggtcatggaaccactcaggcagtgattcgcggaacaggaatggatacttatctggagaaatatcatattccggctgttgattattctgagggcgtgaaaactgcttatccgcagggagtccaggcaaaggaatttatcctgccaaaagaactgttggagcaggactgtgtgatttccctgagcaagatgaaaacacatgcattagaacgtatcaccggtgcggttaagaacagctatgggtttgtatatggattccataaagcgaaggggcacacgcagtacccgagtgcagacagctttgccagaatgcttattgatctgaataaatgtgtggcaccgaagctgtatgtgatggatgggatcgtggccatggagggcaacggaccgggttcgggagatccggttcctatgaatgtactgctgatgtccacagatccggttgcactggacagtgtattcagccgtctggtttatctgaaaccggagatggttccgacgaactatcatggcgagaaaatgggacttggtacatggaaagaagaggagattacccttctgacaccagacggggagatttccatggcagaggcagtgaaaaaatacggaaatccggcttttaatgtagaccgcacagaagtgcgaaagaatatctggacaagaatggcgggagcgttaaacatttttcagaaaaaaccatatatagaagctgataaatgtgtccgctgcgggatctgtgtgcagagctgtccggttccggggaaagctgtggatttcagaaaaggcaaaggaaagccgccggtatatgattacagaaagtgtatccgctgtttctgctgccaggagatgtgcccgaaaaaagcaatcaaagtgaagtagatgaaaagcagataataaaaagcgcaactgtttatagaattgccatggtattttcgcaggatcaggacagaggaaagccggacaattaccaaaaagcacataacagaggatgagaatatctcggattgagacagattctatcctaagttatgtgcttttttgagtcatatccctctttaaccgaatcaggaaagttccctgctttggctgcgaatattcgttattcgtctgactatggctgtcgaagatacaaaatctatcttccgaggcttctgcttatctcgcggatgaattccggagtagtaccacagcatcctccgacaacagacgcaccattttcgatcagaaccttcatatgttctgcaaagcttttggcgtccatactgtaaatggcatttccctgatcatcaatcgtcggcataccggcattaggtttggcgatgacaggaatggatacgttctctttgatattgcggacaacggataccagctggtcaggtcctacagaacagttgatcccaactgccacagcacctgcaccctcaagggcgatcgcagcctccacagcatttcctccgctgaaaatgcttccgtcagcttctacggtcattgtacacattacaggaagagaacttacggatgcagcagcatccagtgcagcaagtgtttcctcgatattgatcatggtttccgcagcgatcagatcaacacctgcatcttcaagaaccttaatctgttcacagtatgtttcatatgccatctcataggtgagatcaccggcaggctccatcatctttccggttgtggtaatatcaccggcaacatagaccttatgtcctactgcctctctggaaatatttacaagtgcatggttcatttccgcaagcttatcctgcagtccgtgaagtccgagactgtaacggtttccgccgaaagtaggtgcgtatacgatctggcttcctgcttcaacataagccttttgcagattctgcagaacttctttgtgctccatgatccatgcttctgtacagattcctcttggcattccggcggccataagattggaaccggtagcaccgtcgagcagtacaacatcctgtgtcagcttctgaaattcttctctagtcatggaaatttcctcctgtgtttttctatgaaagtcctgagtggctgccatgaatcagtcatgtctgcatgggtaaattcgtggataccggacaggatgactttcatatactgtgacattatagcacagctttcaggataaatggagaaaattaataaatttttatttcatatgatgcagtaaaaatttcatccttgtccagagtgttgatatatttcttttccggaagctcgcccttaaatccaaaatcatcacagcgtcccatccatggttcaagacatacaaaaggagaacccgggacggaccagatgccaaagcttggaaatccatgacagatcagttccacataaggagttccgtcagggaaagcgatgccggccttttcaatctggtcatcaaaaataagggcatctttgtcaaacatgtgagcatcaataaggcaggaaccattctcaagctccagtgtataagctttatctgcaaccgcggtgcctgatgacatgtcgatcagcagataggagagggaatcccggtcgtcgaaagtaagatgatattgctcctgggagccaattcctccggcaggtacattgaatgcaggatggccgccaattgtaaaatacatggtttcatcattaaggctgatcacttcccagcatacactgacctggttcttttccagaacatgcttgatcttcagctcaaaatcatatggataattttctcttgtggcatcagaagatttcagcctatgggtgatggaatcagcagtcatatccacgcaggtaaattcgctgtccctggcaaacccatgctgactggagggatattcgactccattaatacgatagtgatcctcaaaatgacgtcccacattagggaaaagaaccggtgcgtggcgtttccagtaagccggatctgcctgccagatcacttctctgttatgtactttatcaaaaatgctgcaaagctcagcaccatgatcgtctacagatactctaagatagtcgttttcaattgtatggatcataaatgaatcctccttgatcgataaatattgtgtaactgttcagctggcagtattctgcaaatcaccgaaggtgatttgaaatgcattttggttcgtaactgcgaaggtaccgaatagtcacggacattgatgtccggcaatttttaaaaaggttttgattgctataagttgatgccggaatcaatctgtctataagtataacacatgggccggattaattatagttataaatatacaaaaatagatctgaaatgtcgtggtaaattgaaaaatacactgatatagtgacgaaatacagaaatcatatgtgtaaaaaccacaataaatgattgacgaataaaaaaatatttgttacaatttacctcaacgagtcctgcgggaccagagcgtgtctgaaaaattgtgacacacatcttgcgtaaagcatttttcagacacactctaagacataatgaacaaaacgtgaaaacaaggaggtcattgctatggcgaaaaaaagaaatatcattgttggacaatcaggaggacctactgcagtaatcaattccagtcttgccggagtttataagaatgccattgaacgaggatttgacaaagtatacggaatgcttcacggcattcagggactgttggatgaacagtatattgatctgtcaacacagattcattcagaactggatatcgaattactcaagagaacaccatctgcatttttaggttcctgtcgttacaagcttcctgagattcacgaagataaagcaatttatgagaagatttttgagatcttaaataaactggatatctatgcgtttatctacattggcggaaatgattccatggatacgatcaagaaactgtctgattatgcgattctcacaggacagactcagaagttccttggtgttccgaaaacaatcgacaatgacctggcgctgacagaccatacacccggattcggaagtgctgcaaaatatatcggcgcatccacaaaagaagtgatccgcgatgcactgggacttacttataagaaaaatatgattacgatcatggagattatgggacgtaatgccggatggcttacaggtgccacagcactggcaaaatctgaggactgcgacggaccggatttgatctatctgccggaagtgccttttgatgttgagaaattccttgcaaaagtaaaagatcttctgaataaaaaagcatctattgtaatcgcagtttccgagggaatcaagctggcagacggaagatatgtatgtgagcttggaagcgtgggagactatgtggatgcatttggacacaaacagcttcagggaacagccacttatctggcaaacttcctggcagcggagtgcggatgcaagacaagagctgttgaactttccacattacagagaagtgcttcccatatggcatccagagtggatattgatgaagcattcatggtaggtggtgctgcagttaaagctgcagatgaaggtgacacaggtaagatggttgttatcgaccgtgtttccgatgatccctacatggcagctacaggtatctacgatgtacacagaatcgcaaatgaggagaaacttgttccgagagaatggatgaataaagatgctacaaacgtaactaaggattttgtagactatattaaacctctgatccagggagattatcagcctattatggtaaatggtatgccgagacatctggtactgaacatgaaaaaaggcagaaagaaataattgataaaaattataaacgggcagccgggcagatcaacttatctgttttgcttcccgttttttcctgttatatatgagatgtgagagaaaaatgtagataaagaccagaataaaggactgagaaaaccttaacaataataagaataataaaataaatcacattatgcagaatgtataaaaattttagctaattttagcagaataaccttgacgaaatgacacaaattctataaaataattatgtgcgtataagaaacatatatttacttatgtgcgaaaggtgtggctgttcagttacttcacaacagaatgctgaatagttacaaaagaacaataatttaggaggaaaatgtaaaatggcaaaatgggtttacatgtttacagaaggtaacgctaatatgagaaaccttctgggtggtaaaggtgccaaccttgctgaaatgacaaaccttggtcttcctgtacctcagggcttcacaatcacaacagaagcttgtactcagtactatgaagacggaagacagatcaatgatgagatcatggctcagatcatggaagcaatcaccaaaatggaaggagttaccggaaagaaattcggtgacaaagaaaatcctctgcttgtttccgttcgttctggtgcgagagcttctatgccaggtatgatggatactatcctgaaccttggtttaaatgaagacgttgttaacgtacttgctgaaaaatccggcaatgctcgttgggcatgggactgctacagaagattcatccagatgtactctgatgtagttatggaagtcggaaagaaatatttcgaagaacttatcgatgagatgaaagctaaaagaggtgttaagcaggatgttgaacttactgcagaagaccttcatgaattagctgaacagttcaaagctgaatataaagcaaaaatcggtgctgatttcccaactgatcctaaggaacagttaatgggtgctatcaaagccgtattccgttcctgggacaacccacgtgcgaacgtatatcgtcgtgacaacgatatcccgtattcctggggtacagctgttaacgtacagatgatggcattcggtaacatgggtgatgactgtggtacaggtgttgccttcacacgtgaccctgctacaggagctaacggtctgtttggtgaattccttacaaatgctcagggtgaagacgttgttgccggtgttcgtacacctatgcacatctccgaaatggaacagaaattcccggaagcattcgtacagttcaaacaggtttgcgaaacacttgaaaaacactacagagacatgcaggatatggagtttactgtagagcatggtaaactgtatatgcttcagacacgtaacggtaagagaacagctcaggctgctttaaagatcgcttgtgaccttgttgatgagggaatgagaacagaagaagaagctgtagctatgatcgacccacgtaaccttgatactcttcttcacccacagtttgatgctgccgctctgaaagctgctacaccaatgggtaaaggccttggcgcttctcctggagctgcttgcggtaagatcgtattcacagctgatgacgctgttgaatgggctgaaagaggagagaaagtcgtacttgtacgtcttgagacatctccggaagacatcacaggtatgaaatctgctcagggtatcctgacagttcgtggtggtatgacatctcacgcagcagttgttgcccgtggtatgggtgagtgctgtgtatccggatgcggtgatatcgctatggacgaagaaaacaagaaatttacacttgctggtaaagaattccacgaaggagacttcatctccatcgatggtacaaccggtaacatctacgacggaatcatcccgactgtagacgctacaatcgctggtgagttcggacgcatcatggcatgggctgacaagtacagaacaatgaaagttcgtacaaacgcagatactcctgcagatgctaagaaagctgtagagcttggcgcagaaggtatcggtctttgccgtacagagcatatgttcttcggtgagggacgtatcgatgcattccgtgaaatgatctgctccgaaacagcagaagagagagagaaagcacttgaaaaagttcttccatatcagcaggatgacttcaaaggtctctttgaagctctggaaggtaaccctgttactatccgtttcctggatccgcctcttcatgagttcgttcctacagatgaagctgacatcaagaaacttgcagatgctcagggcaaaactgtagagcagatcaagactatcatcgcttctcttcatgagttcaacccgatgatgggacatcgtggatgccgtcttgctgttacttatcctgaaatcgctaagatgcagacaacagcagttatccgcgcagcaatcgaagttaagaaagctcatccggactggacaatcaaaccggaaatcatgatcccacttgttggcgatgtaaaagagcttaaatatgttaagaaattcgtagttgagacagctgatgctgagatcaaagccgctggttctgaccttcagtatgaagttggtacaatgatcgagatcccgagagcagctcttacagctgatgagatcgctaaagaagcagacttcttctgcttcggtacaaacgaccttactcagatgacatacggcttctcccgtgatgatgcaggtaaattcctcaatgcatactatgacgctaagatctttgagaacgatccatttgcaaaactggatcaggttggcgttggcaagctgatgaagatggctatcgaactcggcaaaccggttaacccgaaccttcacgtaggtatctgtggcgagcatggtggagatccgtcttctgtagaattctgccataagatcggtcttaactatgtatcctgctcaccattccgtgtaccgatcgctcgtcttgcagcagcacaggcagctatcgctgagaagaatgcataattagcataaaatatagattcatgcgcgagcatgagagtgtccaaacgtaaaatggctcctggaactttagaaaaatctgaagctccaggagctttttgatgtattttgtagtgaaacgtggaataatcatttgtagaaagttttaattatgtgatctttgcatttataatcaggagatttgatttcaaaactccggaatgcgaggatgatgatacagagacaaaactttatacaaaagcagacgtaaatgtaagaaaagaagcaggaaaaatagccggataattaagatagtttatctgattatccggctgtttttgtctggctgcatagtaagcttcatagtaaccttcatggtaaaacaaattgacgttacatatgaaaagtgatataatgtacaatgatttgacataaaatatataaaaaaagtacaaaatacacaaaaaatacttactgtagaggtgcttcaatgtatgcagaattacaaatggaactggaaacaaaagaaataaattacaggcagtcatcaaatttacagggagttattatggaaaatatttctccagaatatgcagccagactacatggaaaccagttaaatccttatagtcaatgtatcacgagggaaaataacagcaccatctggacaataaagactttgaatgaagaagcatatgaaaatataattatgccgttgtctgaatgtacagatatttttttgagaaaaaagggattatcaatttctgtatgtaataaaaggatgcacttgaaaaatgataatgaacttatcacagagttttatgagaagaaatgtccgaaatatttggagataaagtttcagacacccacagcttttaaaagtgacggaaaatatgtaatatatccggatttgggcttaatatatgccagtcttatgagaaaatacagtgctgtttcagaagcttttgatatgtttgatgaggaaacactggaggcacttgttgaacagagtgaaatcgtgcggtaccgtttgcagacagtaccatttccattggagaaagttcagatcacaggttttacaggaagtatctgtattcatattagaggaccagaaacaatggcaagatatctgagaatgttatttaaattcggagaatttgccggagtgggaattaagacaggcatgggaatgggagcaatgaaatacgtcaggaggaatgaagatgattgaccagaaaattaagttgattacaggaagtctgcttcatgacataggaaaagtagtttaccgggaaggcagtgacagaagaaatcatagtgtatcaggatatgattttcttaaagaagagggaaaaatagaggataaagagattcttgactgtgtaagataccatcacttttcagaaatcaaaagtgcacgtctgaaagaggataatctggcgtacatcgtttatctggcagataatatagctgcctttgcagacaggagaaaaaaggaagacactgaagaaaagggttttgatctgtcagtcccgcttcagagtgtgtttaatgtattgaatggaaataaccaaagtttttattatcagccaggtgatatggatgatcaggggaagattaattatcctgcttctgagaaaaagccattttccagagaattctatatgaaaatctgtcagagaatgttagataatttcagaggtatgaattggagtgaagaatatctgaactccttactggccgttatggaagcaaatctttcttatatgccatcctccacttcaaatgaagaattaagtgatatttccctgtttgatcatgtaaaattgactgcggcaatttctagctgcatatatgattatttaaacgaaaatcatttgagttataagacggaattatttgataagaaggatttttatgacaggaacgcatttctcttatgttctatggatatttcaggaatacagagtttcatatatacaataagctctaaaaatgcattgaaaaatttgcgtgcaaggtctttttacctggaaattatgatggagcatatcatagatcttcttttagacagactgcaactgtcaagggcaaatcttttatactccggaggcggacattgttatctacttcttgcaaatacaacggaaactgttatacagattcaaaaatttcaggaagaattgaaggaatggttattgaaacagtttcagacggatctttttgttgcttttggatatgtgcaatgtacagggaatgcattcagaaacgttccggagggtagttatacagagttattcaggaaaatgagtaaaatgctgtcgttgcaaaaacagcacagatatacggcgagagaaataattcggttaaataatcgaaaagagcaggattattccagagaatgtaaggtttgcaaaaaaatcggacatgtagatgaagagggagtttgccctctgtgcagaaaaatagagaagctttcaaaaaatgtattgtatgcagatttcttctccgttgtactggaaaatccagatgaaagagaagatgccatgccactgccgggaggatattgtctggttgcagacgatgaaaaaaaactgtgcagacgaatggaaaatgacgattattttgtacgagcctattctaaaaataagctttatacaggaaaacatattgctacgaagctgtgggtaggagattattcaacaggaagtacttttgaagaatttgcccgggaagctgaaggcatcagcagaatcggggtattgagagcagatgtggataatcttggacaggctattgtgtcaggattctgtaattcaaaaaatggagacagatatatgacattatccagaacagctactttatccagacagttatccttattcttcaagtattatattcgattcatcctggaaaatggagaatattcactggaaggaaaaaatggtggaaagaaaagacaggctacaattgtatattccggaggagatgatgtatttattgtaggtgcatggaatgatattattgaattgtctgtagatctgagaagaaaatttgaacaatatactcaggggacattaagcatttcagcaggcatcggtatttatgatttttcttatccgattgctgccattgcagaagaaaccggtatgatggaatcagagtcaaagagaatgccggaaaaaaatgcagtgacattacttcaggatggagagattcatctggtggatgacggggatgaagaaaaagagatcagcgatggaacctattcatggaaagaactggaagaaggagttgttcaggaaaaatacagggcattatgtgatttttttgaaggtattgacgaaaccagaggaatgtccttcttataccgtatgatggagttggtaagaggacatgaggagaagatcaattttgcaagaatgatgtatcttctttccaggttggagccgacagaggaaggaacgaaaaaagaaaaatacagacagttgtctcagaaaatgtacaggtggattcagtcggatcaggattgcagacaattgaaaacagcaattaatctttacgcatacattcatcgcacaaagggggaacacagggatgagaattaatgagaataactatgtagacaaagctgaagaggcgattaagagtctggttgaggaatcaaagcaaaaatgcagaggaaaagtaaatattgtaactacatctaaaatacggaatcttctggcaatgaccgcagatatttataatcaggttcttacatatacatcagaaaaattggatgatgaaatttgtggaagaattgagtatctcagaattcgtttcatatatgaatgtggtcgggagccaaaagtaaaagcatttgtaaaacaggcagaaattctggagattcttaaagaaatcagacagagtaaaaagaattatctgttgttcagcaaatatatggaagctttgattgcatttcacaaatattatggtggcaaagaacagtaggaggaaagatttatgtatggaaaaatcaggatttcaggaaatattttagtaaaaacaggaatgcatattggtggaagtggtgcatttgctgcaattggagctgtggattcgccaatcataagggatgccagaacaaatctgccgatgattcccggaagttctctgaaggggaaaatgagaagccttctggcaaaagaattcaatgagcgtgtagtggagccaaatgaagatcatgaacgtattacacgactgtttggctcttcaaaaaggggaaatataaaaagaagccgattactgttttcagatatggttctgaaaaatgaagaagagttacgagatgccggacttcaaagtatgacagaagtaaaatttgaaaattctatttccagagctactgctgtggcaaatcccagacaaattgaacgagctgtcagaggttctgtctttaaactggatttgatatatgaattggaagaggaacaggaatttttggaggatatggaaactctcgcagaagcaatgaagttattgcagtacgattatcttggaggaaatggatccagaggatatggaaaaatccaatttcaggatatttatacagatgcagttgtcggccatgttgataatacattgctggaaaaatgcaatgcgattctgaatgaggctgtgaaagagtagtcggtgaaaggaaggatactttgaattatacattatactgtttggagtttataaatggagtccattttggcaggggaaatctagatagttcagaaatcacttttcatgcggatacgctgttttcagctttgtttcaggaagcactgaaaatgaaaaaacaggatagatttctgaaacaggtgtcagatggaaaaatcatattctctgatgcattcccatacataggaaaaaattactatattccgaagccaatgattgctgttcagacggaggatgaaagcaaacagggagattcccgtcagaaaaagaaattcaaaaatttgaaatacatcccagtaagtacgctcgcagattttgtgaatggaacttttccggaagaacatatggaggatatgaaatatctgggactttatgatatgaaagtttcagtaggaattcatggaatggaggagccggaaccttttcgggttaatacatggcattttaatacaggaacaggtctgtatgtgttggcaggatatgagaatgaaagtgacagggaattgttagacgaactgttcgaaagtctgcaatacactggtataggtggcaagaaaagttccggactgggaagatttgtatacaaggtctgtaaagttccggaagatatgatgggatatttaaagaaaaaatcagaaaaaaacattttgctttccactgcgcttcctgaagatgaagaattggaacaagtcatgaaaggttcttcatatcttttaataaaaagatcaggatttgtagattcatcagaatatgcattgcagcaaatgagaaaaagagatctctatgttttttcatctggttcatgttttgcgcatacattcagaggaagaatcattgaagaaagaaacggtggaaaacatcccgtatttcgatatgcaaaagctttcttcatgggggtataatatggaacgaaaattaaaaacatatcagatacatctgaaagtcaatggaccggtattcgtaggtgatggaaacgaaatacagaaaaaagaatatatgtttctgaatagaaataccataggggtgatagacggtgcaaagttctatatgctggctaaaaaacttcatcttcagaatgattttgaacgtttcatgattgatgatacaagagaagacttgaaacattggtgtttcagaaaccatgtatctcaaaatgatttaaaaaactgtatgaaatatgtagagaatgtgggcgacagatcagaagaaaaaggaaagcttcaggtaatgacctgcattacagatccatatgggaatccctatatacccggaagttctctgaagggaatgctacgaacaattcttctgggtagagatattttacaacaccgcgagaaatatagaactgataccagacagatcaggagtgatttggaagttaacaggattaacagaagaatcttaaataataatattgtaaaaattgagaaaaatgcattcaattcagtaagatcttcagggaaagaaactgttgatttcgatattatgtcaggcattatcgttggagacagcgaacccttgtccagagaagatattattttgtgccagaaatgggaacagcacacagatggtacatacaaaacattgaatcttctgcgagagtgcataaaaccgggaactgtcattaaaagtacattgctacgaaaataaaactcgtagccaaaaactgaaccttgacaacaaatgttttcaacaattatgaaagcatcactataaagcagtcacagtattggctgcctgtagtgagagattgatcgtatttaagaaaggctagctttgagcttccacatgataaccatgtttttccaattcccgtatataacgagaaagctgtttttgttcacagtgcttacgtcttgtttcaaaacaggattcgtcaaatagagttccttgttttaacattgtgtagatgatgacaagaagttttcgggcaagtgcgacaatcgcttttttggctccttttttctgtttgattctccagtaccatgccgaaagataagtgttgcgtttccctgcaatcacccaggcaatttcgcagagcatactttttatgtaaggattgccttttgtgacagaggtgctttttcgttttccagcactttcgttattacctgggcacaaaccggcccatgagcagatgtgttccgcagttttaaacggcttcatatcaataccgatttcagcaataattgcacaggaagcagttgtgcttattccatagatgctattcaactgctcaacctgcagggcaaatggagccatatcttcctcgagactcgtttcaatttcagcaagatgtttctttaaagaatcataatgagtcatgagaatccttaaaaatgccttttggtgttctgacagtgttccgttcacggacatgagaatttcatcaatacggtttctggtcttggttttgagacaagaatctaaagcagttttatcaatctgcccatgttcaactaaatgcagaatgatgtttctacccgaagcgccaaaaatatcagaaataaaggatgatagacggaagccggaactttgtaaaaatttctcaatcctgttcttctgtgacgtaatatcgcggatgacactcttacggtaacgatttagatcgcggaattcccgaatccttttttcgggaataaaacttccgttcaaaagtccggcgcgaagcaaggtggaaatccattcggaatcccgcatatcggtctttttgccaggaacatttttcatatggcgtgcatttacaacaagcagggtaatgtcaccagagaaagcatcctccagtatttcataaatcggcatccaatagataccggtgctttccatagctacatgatggcagtttttagaaacgatccaattccgtaatgctatcatatccggaatcaatgtagaaaactcacggatttcagaacgggttggcttgcccagaggaccagtcaggatacatgcaacaattttttctttgtggacatccagtccacaggaaatttccagaaggtctttcatacagaacaactcctttactatagaattggcaggagatttgcccgagataatacggactttgctactcgtgctattcataaaaggtgcgacaatatgctgtgctcaagggcaaatcatttacgttgacaaacggggtgcaaatcctccaaggtgcaatcaaacttaatcctgcctaagactattgtaaggcaaaaagagaagtgaaaaaagtagtggagtcagtatcctattttcattataggctgagataagctttcatgattcgttgacaattgatgaaacgctttgtaatataaaaaagaaagacattttggaagcagtacagttattctatgaacagtattatcagaatttccagaagaaatttccgcgaagtgacaggagaaaaccgaatacagtatttctgggaggtggaagcggtttcgtttccaagacagtgatttacccgttattcggagaaaaagagggcattgaaactgtaaaaaatatttttgacagaacaaatgtgcctaaaacccatcaacattataaagatactcgtataggagtatcccctcatattttaaaatgcacaagatatcagggaaaagaatatatgatgggggaatgtgaattaaatattatttgagcattttgttcttaaatgcgcgaaattctgtattttgccgcgcatggcttaaatactggatttgtgagaattttttactttccaaaacggctgcatttcaataaaattacttttcccccgcaatccccctatctgtcccagacagaacatggggttgcggggatggtattgagaaatgtagctccccgataggggacggaaacttgcgcccacccgcaggcaggcgcatcaagctgttattgagaaatgtagctccccgataggggacggaaacgctattcttctttccattggtacgatgtacatgattgagaaatgtagctccccgataggggacggaaacccggatgcggctacagctgttcgtacgattgttcattgagaaatgtagctccccgataggggacggaaacagtctttcgactctttatgtgtgcagaaaaataattgagaaatgtagctccccgataggggacggaaaccattttcatctttaccgtcaatcaggcatttttcaattgagaaatgtagctccccgataggggacggaaacataacgaatccattcatccataattccaaattcaattgagaaatgtagctccccgataggggacggaaacccgttataatatattatagtagcattcattccgcaattgagaaatgtagctccccgataggggacggaaaccatcatcataattgctatatgggttataaacgcattgagaaatgtagctccccgataggggacggaaactattgatcttggatgtttccaatatcagtagtataggattgagaaatgtagctccccgataggggacggaaactatgttttccctccactttttaacttgtgtctttttattgagaaatgtagctccccgataggggacggaaactatgtgcaagcccttttacattcctccttttaagcttatattgagaaatgtagctccccgataggggacggaaacgaggtatccatcaatccctgaatggtactattgtcattgagaaatgtagctccccgataggggacggaaacatttaacagcgtcgctggttgtgagaggaggtttaattgagaaatgtagctccccgataggggacggaaacaagtgcaaggtaaatccatggtactacttaagagaattgagaaatgtagctccccgataggggacggaaacgattgtctcaacgttctttaaaacctgtttacgtgattgagaaatgtagctccccgataggggacggaaacactcacataactgagaaatgaaaggagaaaaaagaaatgattgagaaatgtagctccccgataggggacggaaacttaatgatagccgctctctgagccggagatgttcctcattgagaaatgtagctccccgataggggacggaaacctccacccatttctgcaccaataaacaaatgtcccaattgagaaatgtagctccccgataggggacggaaacctttgatcagtttgtatctgagcgcagcctcctcagattgagaaatgtagctccccgataggggacggaaaccagaccagtctttaaattcaaaattattattcatattgagaaatgtagctccccgataggggacggaaactttacgtcaacatagttcagtgtcatttttcagtaattgagaaatgtagctccccgataggggatggaaattcgtattcaaatttagaaacagttacatttggcaataaagtggattgttactagagaaacagaggtgatatcatgagtcttttatatgtaaatgacagtggtgcaacaataggaatagaaggtaactgctgtactgtaaaacaaaaagatggttcgaaacgaatgcttcctatagaatcgctggatggaattacaattatggggcaatcccagatgacgacacagtgtgcagaagaatgtatgcagagaggaattcctgtaagttacttttcaaaagggggtaaatattttggcagattaatctcaacaggtcacgtcaatgtagaacgtcagagaaaacaatgtgcactctatgatacgggttttgctgtagaacttgctatgaaaattttaagtgcaaaaattaaaaatcaaagcgtagtgctgcacaggtatgagaaaagtaaaggtttaaatctggaagaagaacaaaaaatgttagctatctgcagaaacaaagtattgacctgtgatagaatagaagagatgattggttttgaagggcaggctgcaaagtattatttcaaaggattgtcagcctgcatagatgaaaattttacttttcagggaagaaaccgccgtccgccaagagatgaatttaattctatgataagccttggatattcaatattgatgaatgaggtctattgcaagatagaaatgaaaggcttaaatccatattttggttttatacacagggatgcggaaaagcatcctactcttgccagcgatatgatagaagaatggcgggcaattatcgtggatgctacggcgatgagtatgattaatggacatgaaatcctgaaagatcacttctattttaatatggatgaaccgggatgctatataacaaaggatggcttaaagctgtatttaaataaattggagaggaaatttcagacagaagtcagatatttaaaatatgtagactacgcggtaagctttcgtcgtggtatttttcttcagatggaacatctggcgaaagcaattgaggagggagacgcaagcctttatgagccaattatcatacgatgatgaagattattatttccagatatctgatgaattggaatcagataaggaatttgttttgattatttacgatattgtagataatcgtaagagggtaaaacttgccaaacttttgtccggttatggaaaacgtgttcagaagtcagcttttgaggcaatgctgacaacacagagatataacaaactgatagaagaaattccgagatatattgacaaaacagaggacaatgtccgaatatataaaataacaggaaaaggcaaggtaactttatggggtgaagtgccagaatttgatgaagagattgttctgatctaactaaaaaatgtatagataaaacggaggagaaaaatggcaaggaaatatttattttcaccaattggaaatacagatcctattaaatatttatatgatggctctatgatacacatatgcagatattatcagccggatgttgtatatctttatctgtctaaggaaatgatggagaatcataaaaaggacaaccgttatgtaaaaaccctggagctgcttggagagtttctgcatcacaaatttgagattcacattattgagaactcagatatgatagatgttcagcagtatgatatattttataatgagtttcatcggattattgcagaaatagaagaacaaaaggactcggaagatattctgctggtaaatatggcttccggaactcctgcaatgaagagcgcattgctggttatggcaacgctgtctgagtacagatttttaccaattcaggtctcaacgccacaaaagaaaagtaatttagaacatgaagaacgggacgagtatgatgttgatgccaactgggaattaaatatggacaatgaagaaaccgcagaaaacagatgccaggaagtaaaatgtctgaatttaatgcgtcttttgaaaattgatatgataaagaagcatttacttgcctatgattatcatgctgctttagctgtgggaaaagaaataaaagaagatttaagtcctgttgcatatcagtggctggaaactgcagatgcccgttcgcttctggactggacaaggatgaacagggttttgccggaaaataatgggattattactgcagtacgcggagaaaatgaaaagaaagtcctgtttgaatatatgctggctctggatttaaaggtaaaacggggagaatatgctgactttatcagggcgattactccgttaggtgtagatttgcttgaaatagtattggaacagtcatgtgatattgacattaccagatattataagcgaaataatcaaagaatctgggacaaaaacagacttgtcggtgaaatactggatattttaaatcaaaaattttatccattcagatatgggccggtatattctgctcatctactggaaattatccagaagaaatgtacagatacgttaatggtgcagagaatacaggaactggtaaatatagagcagaatgtgagaaatgtagcagcgcataacatagtatctgttactcctgaatggatcaaagaacgcacaggaaaaagcgttgatgatattttctggattctgaaatacgtctgtgaacaggtaaaaataaacaccagaaaagaaaactggaattcctatgattctatgaacaagaggattattgatgaattagataaagattgatctgccagatcttaactgaatcagtatctgttaatgcaatccctgtttttcggactttgctgaaaatttatttctgatagaaatgaggtacatatatatatgagtaaaaaaggttatagtcgtcccggattatttggaactatgaagcattatgacgcggacggaaactttataggagagagccgtccaggatggcttggcagcatggagaattatgatgccaatggaaataagactggtgaaagtcgtccaggctggcttggaagtatggaaaattatgatgctaatggaaacaaaataggtgaaagccgacccgattgttttggaaatatgaatcattataatgaaaatgggcataagacaggacatagcgataaaggtatttttggaggatggaaccattttgatgaataaaaaagatacaaagatcaaccgaaatgatatgctggaattaacccgcagaatgacattatccagaaactgctttgtgcgtgcagcaggagcatatatagatgatgagggatacatagataataccttcaatgtaagcttcaaaaatatgagcaaacatgatcagcaggtaaatctggatcttgcgaaaaccattcctttttcaaaaacaaatgaacagttaaagtgttataaattccctgaaggggatatggcatatgacagcatccacaaactgctgatggcattatcacaatacggattaaaagatgatcttctggttcagactctctgtgaacagcttgcagagggaatctgtgatacaaaagattcttcggataaaataaaccgtctgcagggacaggagtttggaatttatatttatcatggaatatatgatatcccaaagaaaggctcagaccatagtgaacagtgggagtcagaagaaatatacagtttcctgatctgtgtggtgtctccggtagataaagattacaatgccggaactccaaaatgcggctttattttcccggcctttgaagaacgttctgcagaacctggaaaaatagatatattctttgaaattccagagtatccggacgaaggatttttgaacaggataatagggcaataatctgaacaaggtgcttatttatgagggagtgagatagataaatcttaattacaccatatgcaattcaatttagtcatttgtacacaaaatgactaaattgaattgcgctatgactaaattaatgataaaatgggagcaagacaatgacattacacgctgagaggataattgatgagaagttttgattttgagaaagaatacagcaaattgcttactcctgatattgtatcatatattgctcagattcatgaatatagaggccggtattccgcagacaatgtacaaaaggaattactgtcagaactgctggagattgccagaatacaaagtacggaagcgtctaacagaatcgagggaattataacaacagatgatcggttgaagaaaattgtctgcgagaaaacattgccaaagacaaggagtgaaaaagaaattgccggatacagggatgttctggcaacgattcatgaaaactatgaatatattcctgtcagttcaaatatgattctgcaactgcacagagatttgtataaatttagtggcaatggatacggagggaattttaagtctgtggataatgtaatcgcagaagaacttccggatggaacaaaaagggtaagatttcagccggttccggcatgggaaacagcagaaacagtcaatgatttatgcaatgcatttaaggatgctgtcaataagcagtttatggatatactgctgttgcttccaatgtttatactggattttctttgcattcatccatttaatgatgggaacggaagaatgagccgtctcctgactttattgattttgtataagtcggaatattatgtcggtcagtatattagtactgaaagactgatatcagacacaaaagagaattattatgaagctttgcaggaaagctcatgggaatggcatgaaggcagaaatgattatgtcccttttgtgaaatatatgttagggattatggttgctgcctaccgggaatttgcggacagggtggagattcttatggacaaaacaatttcaaaatctgatcgtattggagaaattatcagaagctcctatggcaggattacgaaagcggaaattgcagctcaatgtccggaaatcagtcagacaaccatacagcgaacgttgaacgaattactaaagaacaatcagataataaaaataggcggaggaagatatacttcctatgtctggaacagggagaacgaatgatatggttaccggagaattaaaaagtaaaattgataatttatgggaaatattctggacaggaggactgactaatccactggatgtaattgaacagatgacatatctgatgtttatccgcgatctggatgatgcagacaatgtccatgcaaaagaggcggcaatgcttggtttgccacataagagtatatttgccggagaaatacagatcggagaccggaaaattgatggaagccagctgaaatggagtacttttcatgattttcctgctgcaaaaatgtacagcactatgcaggagtgggtatttccttttataaaaaatctccatggagataaggaaagtgcctattccaaatacatgggagatgccatttttaaagtaccgacccctttgatgctggataagattgtgacgactatggatgccatttatgagcagatggaacagattaagtcagcagacacccggggcgatgtatatgaatacctgctttctaaacttgctacggcaggtgtaaatggtcagtttcgtacaccgaggcacattattcgaatgatggtggaaatgatggatcctaaggcagatgaaatcatctgtgatccggcgtgcggtacgtctggttttctggttgccgcaagtgaatacctgcgagataaaaaaaagcaggaggttctttttgacagacagaataaggaacattatatgaatcacatgttccatggttatgatatggacagaaccatgcttcgaatcggtgcaatgaacatgatgacccatggtgtggagaatccatatattgagtacagagacagtctgtcggatcagaatacagataaggaaaaatacagtctgattctggctaatccgccatttaagggaagtctggattacgatattgtaagtgcagatttattgaaagtatgtaaaacaaagaagacagaattactgtttcttgcactgtttatccgtatgctgaaaattggtgggagatgtgcatgtattgtaccggacggagtgctgtttggttcttcaactgcccataaagccataagaaaagccctggtagaagaaaaccgtctggaagcagtgatttccatgccctccggcgtgtttaaaccatatgcaggagtatccacagctattttgatttttaccaaaaccggacatggtggaactgataaagtctggttttatgatatgaaagcggatggttttagccttgatgataagagaacagaaacgaaagaaaatgacattccggatatcatagagcgttttagaaacctggataaagagactgaccgtaaacgcacagatcagagcttctttgtaccaaaagaagaaattgcagaaaatggctatgacctgagcattaacaaatacaaagaaatcgaatatgtaccagtagaatacccatcaacacaggaaatcatgacagagctgcatgaaattgagatgaaaattggcgaagaaatgcaggctttggaagagttgctggggttaaattaaggtttgtagggatggtagagatggaaaaatataagcttggtgatatttgtgaaattgtatcaggcagtaccccgaaaaccaatatagatgagtattgggaggggactatcaaatggataacacctgcagaattaaatgatgatacgtatattattactgatagtgtacgtaagattacagaacttgcagttaaaaaaacaggattaaaatcatttccagagggaacagtgattctttcatcaagagcacctattggtaaggtggctatagctggctgtgagatgtattgtaaccaaggatttaagaatctaatttgttctaaaaaaataaataataaatatttatactggttcttaaagggaaatacggtttttcttaattcacttgggcggggtgcgaccttcaaggaattatctaagtcaattgtttcaaacattgagataaatcttccagatattgtctatcaaaaaaaagcagtggagacattggaaaaagtaagtgaaattattgctctaaggaaaagagaattgtcttcattagatgatctcattaaagcccgatttgtcgagatgtttggtgatccggcaactaatccgatgagatggagcgaaacaactattggtgatgaatgcttttatataaaagatggacctcataaatcgttgcctgatattggaaaagaaaatggtggacatccattcatttccgttagaaatattgtcaatggttacatagatttttctacggcaagatacatttctgatgaagattatgctaatgcgataaagaaatgtcatcctgaaaaaggtgatatgctttatagcaaaggtggaacaactggaatcgcaaaattgatagatattgatgaagaatttgcgaactgggtccatgtcgcagtgttaaaatttgataagtctaaattaaatggaattttttttgaaaatatgctgaatggagattattgttttgaacaatctcagaggctgactaaggggattgcgaatagagatttggtgcttagtgcaatggcgcagataaagatgtatcgtccaccaatggagattcagaaacaattcgcagacttcgtcaaccaagtcgacaaatctaaagttgcaattcaaaaagcattggataaaacccagatgctatttgattcgttaatgcaggaatatttcggataggagggaagtttgtgcaggattacaaaaaatggttggttgagagatttataattgaacggaaacgctttgacagatctggtgtatatgcttacacacagcgtgccatggcatataattccaataaaattgaaggaagcacacttactccggaacagacagcctctctttttgacagtggaacattaccgcaaagtgatgactattacagagccaaagatgttgaagaaatgaacggccattttcttatgttcaattacatgcttgatacccttgatgaagagttgacaccggaactaatcaaacatctgcattatgaattaaagaccggagtattcgaagacagagcgaatggatatgcaattggtgattataaaaagcgtccaaatatggtagggatgtatcgaacaacgttgccacaggatgttgagatggaaatgaaccaattactaaagtggtatagagaacagaataaaaatatgagaacccttgcggaatttcatgccaaatatgaggcaattcatcctttccaggatggaaatggaagaaccggaaggatgatcatgtttcgggaaagtctaaagaatccggatattcttccatttattgtattggatgagaatcgaagtcaatatattgatggacttaaacaatatagagaagagcagaaagtagacaagcttgtctcattaatgcagaaagaagctgaggaatattatcagcaatgcaaatactttatgggctaatgcattttgtacaaaggatgcattaaaatgtcttgaatacagagattgtgaggtgctttaatggtaggactcggacgggaagataagaaagataatgatctgttttacacttgcagtctgattgactatatttcgcggaaaacgaaaaatattcgtgcagatgtagtaaatcaattaggcaggaaacgtctggagaaaatctatgatctggcagatgtgtatcattgtgataatattgatcaggttagtgaagattttattgcagaggcgcacataccaacagggaggttcgataatgtcaaggaatgcaaatattcaattccctctcattgggatattggaaaagtatataaacgcttgataaaacaggtagctgccagcgagaaaatagaggtagttgatgcactgatcaaggtttataattcctttatcagcgaaaaaatagatgattataacagtagtgtttactatgaaaatccatcttatatttatgaaagttacagagaaaataaaatgttataaaaacaatggttgaaggatgctggtataaagagggagtataccagcatggaagaaaaagttgtaaaaatattaaatgagatgtcagaatacctttctattgcacagatgaaaaaacttcaggaagtaatgctaaaagtatgtgcagagaatgaagctgataaagtagagattccaaacaaagattttctggaaatgtttctggatgccaagaaaatagaaggatgttcagaaagaaccttgcagtattatcgggtaacagtggagcatttactttcccaaatgggaaattctgtgcgaaaagttacaaccgaagagatacggacatatctggctgattatcagaaaaacagcaattgttctaatgttaccattgataatattcgaagaaatatatcaagctttttttcatggcttgaggaagaagattatattctgaaaagtccaatgagaaggatacataaaattaaaacaaagacagtggtaaagaatacgatttccgatgaaagtatcgagaaactgagagatcattgtacggaaatcagggatctggccattattgatctgctgtattccacaggaatccgagttggagaactggttaatttgaatatagatgatattgatttggaaggcagggagtgtattgtatatggaaaaggtgataaggaacgcagggtatattttgacgccaaggcaaaggtacatctgaaagaatatattgaaggtcgaaaagacgaaaataaagcattatttgtgaccctagatgcgccatatgacagattgaaaatcagtggagtagaaataagattacgtcagttaggcagaaaattggatttggaaaaaatacacccgcataagttcagacggactatggcaaccagagctattgataaaggaatgcctattgaacaggtgcaaaaaatacttggacattcacaaattgacacaactatgcagtatgcaatggttaatcagaacaatgtaaaaacatctcatcaaaagtacatgagttaatattacagtatttagatgaggctgtgaacgcccgatttgtcgagatgtttggaaatccagcaacgccaggagataaatttaaaacttgcaagctaggcgaagtagctgatgttaaatccagccatcgagtatttacaacagaatttgttgctgaaggagttccattttatagaggcacggagataggtgttttggcatcagggcagcagccggaagattcttatagaattagcatggaacattatcgcaagattgcaagtgatgattcaaaacctatgcgtggagatttacttttaccgtcaatatgcaataaaggacaagtttggatggttgatacggatgaaccattttactataaagacggccgagttctgtgtatttctccagaacgatcagtatttgattcaagatatcttcaattttacatgaagttgcgaaccgaagcagaatatccaaagttaggttcaggatcaacttttgctgaatttaaaatttttcagttaaaagagttggaggtggacatacctccgatgaattctcagaaatcatttgatttgtttgctgaccaagtcgacaaatctaaattgtataaaatttcaaccctacaattcccctgtatcccagggtgaaaaaacataagattcgggaggtgtcagtatgactaattttgatttcctgaaaaatgaaccaaagtttaaagattttgcagatgtagcaatctctgcggaaaggatttttcagtttgattatgcggcatctgtgcttaactgcagacgggcaatggaatttgctgtcaaatggatgtattctgtggacagtgctcttttcatgccatgggatgacagactggtcagtcttatgagtacagatgaattcagggatattatagatgcagatcttttgaaacgtatggaatttatacgcaaaacaggtaattttgcagcccataccggtcagaaagtaaagaaggaacaggcagaattgtgtctgcaaaatctatatatttttctggattttgttgcttattgttacgcagatcattacactgtcagcaattatgattctacattactgcaggaaaattctgctcatacagcggatcagtcagttagtcagccggtcggcgatcgggctggtcagtcagaaactgatctgaaactggaacaattgttaaaggaaaatgctgccctgagggaagaactgactgcccgtcgtgaagaacagcagcagacatacgtgactaaaccactggatatttcagaatatgaaacccgaaagatctacattgattctatgctgcaggatgcaggatggactgagggacagaactggataaatgaatacaggattccgggtatgccaaataagtcacaggtcggatatgcagattatgttctccttggtgatgatggtaagatcctggctgtgatagaagccaagagaacctgtgcagatgtggcaaagggcaggcagcaggcgaagttatatgctgatctgattgagcagaaacaaggcagaagaccggtagtatttctcaccaatggttttgatgtccgtatctgtgataaccagtatccggagagaaaaattgcagcaatttattccaaacgggatctggaaaaattgtttaatctcagacagatgcgctcaggtttgggacagatttccatagacaaaaacatagcaggacgatattatcaggaggctgcgattaaggcagtctgtgacagttttgacaccagaaatcgcagaaaagctctccttgttatggctacaggttcgggaaagacacgtacagttattgcactttgcaaggtattgtcagagcagggatgggtaaaaaatattcttttcctggcagatcgtaattcactggtaacacaagctaagcgaagctttgtcaatttgctgccggatttatctgttacaaatttgtgcgaagagaaagataactatgcagctcattgtgttttttctacttatcagaccatgataaactgtatagatacgattcaggacaaagagggaaaattgtttacctgcggacattttgatttggtgatctgtgatgaagcacatcgttccatttacaataaatacagggatatttttaattattttgatgctccgctgattgggctgacagctactccaaaagatgaaattgacaaaaatacctatgaaatctttgaactggagaacggtgtccctacttatggctatgagcttgcgcaggcagtaaaggatggttatctggttgactttatgtctgtggagactacactgaaatttatagagcatggaatagtatatgatgaattatctccggaagataaggaagcctatgaggatacctttgaggatgaaaacggtgaaatgccggacagtattggctcagcagcattaaatgaatggctttttaatgaggataccataaagaaggttttacatatcctgatgacgaacggattaaagatagattatggaaacaagattggaaagaccattatttttgcgaaaaatcaccgtcatgcagagaaaatatatgaggtgttcggaaaagaatatccacatctgacaggatatgccatggtgattgataatcgcctgaaatatgcacagagtgcgattgatgagttttcggattcaaagaagcttcctcagatagcaatctctgtagatatgctggatacgggaattgatgtgccggaagttttgaatctggtatttttcaaaaaggttatgagtaaggcgaaattctggcagatgatcgggcgaggtacccgtttgtgcccggccctgatggatggagaggataagcagaaattctatatttttgatttctgtggaaattttgagttcttccgcatgaataaaggacgtgccactgcaaatatgattgcacttcagggagcaatttttcaactggaatttgagattgcctataaattgcagggagccgcttatcagacagaacgattgattacctatcgtaaatctctggtagagcatatggctggaaaggtgcaggagttaaaccgagaaaattttgcggtgcgtcagcacttaaaatatgtggatatttatgctgttgaagaaaattataaggttcttacttatgaggacactctggcagtgcgggacgaattatctccattgatcagacctgaaaatgatgatgcgaaagctttgcgttttgatgctcttctgtatggaattgaactggcgtatctggcagaaaagaaatatggacgtggtcgaaaggatctgctgaagaaggtttctgcactggcagggatttctaacattccggagattatgatgcaggcagaactgatagacaagattcttcatggaggatatctggacaatgcagggattcctgaatttgagcatatcagagaaaatctccgcgatctgatgaaatatattccggatgcagacagaatgatctatgacacaaactttgatgatgagattctcaacatggagtggaaggattcagaactggaaaatgatgatctgaaaaattataaggcaaaagcagaatattatgtacgccaacatcaggacaatgcagtgatagagaagctaaaaaccaatattcctttagacaataatgacatgagaacgctggaaaaaattctgtggagtgaagtgggaaccaaacaggattatgaggcagaatacggacagaaaccgcttggagaatttgtgcgtgagattgtagggcttgacatgaatgctgctaaggctgcctttgcacaatatctggatgatacctgcctggacagcagacagatttattttgtgaatcagattgtggaatatattgtacataatgggctgctgaaggatctctcggttcttcaggaatcaccttttacggaccagggcagtattgtggacatatttacagacttaaatgtatggctggggatcagaaaaaccatagagcaggttaatgccaatgccattgctgcgtaaatttgtcagtagatcagaacgaaagtgcttgtcgacgagataaagcttggatattcaatattgtggtaaaataaactttggaaaggcggtatatggatgaagtgggcagatggaaagatacgatgttgctgggcaaatccgaaaaatgagcggtatatccgttatcacgatgaggagtggggcattccggtgcatgatgaccggaagctctttgaaatgctgatattggagtgctttcaggcgggcttgtcttgggaatgtgttctgaataagcgagatgcctttcgcgtggcttttgacaattttgattcggagaaagtcagcgcttacactgaggacaagctggaagcactgcggagtaatcccggcatcatacgaaaccgcctgaaaatacaggctgccgttaccaatgcatgggcattcctggaaattcagaaggagtacggcagcttttcggactatatctggcattggacagatggcaaagtaatctgtgaaactggccggacaagttcagaactgtctgactgtatatcaaaagatttgaaaaaacgcggcatgaagttcgtgggaacaacggttatctatgcctatttacaggcagtaggagttctctcttctcatgagcagggctgctttttggcaaatcaggaagctgagcattataatagttattcataagtctgttatttcctgatttttatccatcctgcatgaagcagatgtacacctgcgggaatcagagaaagcagatgtatatttgtgcagctgcctgtttctgcatatatcggcagaatgagtgtatgaaatgcaagataaaggtatgcgcctgcagcaatgagattacacagaaaaaaactccagccgaagataccagaaatagaagctgtaagaatgatgaccagcgtcagggtatcaggaacaaagggaagatgaataaaatcaaattcaggtttcagggagagaaatgcgagcactgcgtaaagaaaaagcactgcatttaatgaactcatgatcttaaacggtaaactgtaaaaaggtgtaacagggcagttgggccatagttcaacatccagtttctgtgcaagctgggttgctgactttgtaaatgttatgtttgtcattacaacagctttatcgcagtcgtagaagtttgcacctgcataggcttcctgaacagctttatttccaacgggatgggtgtaatatttacattgtatcccgtatttttttcgatgtttgaaagcaatgatatcgattccctgatctccggagctttgggttacttttattttagaaaaatgttttcgctttagtatctttgcacattgatattcaaattcatatccatccatgtgttgaatctcccgtattatataaaatgtatagcagtctgcagcaaaataagaataccatgtttgatgataaagaacaagtgttttgcgaagaaaagaagaaggggttattatttacgttactgttcactgg
